United States Patent Application Publication US 2024/0398993 A1 - sequence listing, part 22

SEQ ID NO: 98000 - protein, 54 aa, Homo sapiens
MQKATYYDSSAIYGGYPYQAANGFAYNANQQPYPASAALGADGEYHRPACSLQS

SEQ ID NO: 98001 - protein, 39 aa, Homo sapiens
MENHKSNNKENITIVDISRKINQLPEAESSFFSPFQEST

SEQ ID NO: 98002 - protein, 141 aa, Homo sapiens
  MOD_RES (1)..(1): Any amino acid
XQLEEERAFLRSKTQSLDEEQKQQILELEKKVNEAKRTQQEYYERELKNLQSRLEEEVTQLNEAHSKTLEELAWKHHMAIEAVHSNAIRDKKKLQMDLEEQHNKDKLNLEEDKNQLQQELENLKEVLEDKLNTANQEARIL

SEQ ID NO: 98003 - protein, 98 aa, Homo sapiens
MSTKRRLEEEQEPLRKQFLSEENMATHFSQLSLHNDHPYCSPPMTFSPALPPLRSPCSELLLWRYPGSLIPEALRLLRLGDTPSPPYPATPAGDIMEL

SEQ ID NO: 98004 - protein, 210 aa, Homo sapiens
  MOD_RES (1)..(1): Any amino acid
XLLVSVILISRISSVGGEAMFCDFPKINHGILYDEEKYKPFSQVPTGEVFYYSCEYNFVSPSKSFWTRITCAEEGWSPTPKCLISAEKCGPPPPIDNGDITSFLLSVYAPGSSVEYQCQNLYQLEGNNQITCRNGQWSEPPKCLDPCVISQEIMEKYNIKLKWTNQQKLYSRTGDIVEFVCKSGYHPTKSHSFRAMCQNGKLVYPSCEEK

SEQ ID NO: 98005 - protein, 127 aa, Homo sapiens
MTTKNLETKVTVTSSPIRGAGDGMETEEPPKSVEVTSGVQSRKHHSLQSPWKKAVPSESPGVLQLGKMLTEKAMEVKAVRILVPKAAITHDIPNKNTKVKSLGHHKGEFLGQSEGVIEPNKELSEVK

SEQ ID NO: 98006 - protein, 112 aa, Homo sapiens
  MOD_RES (1)..(1): Any amino acid
XCILADCTLILAWSPEEAGRYLETYKAYEQKPADLLMEKLEQDFVSRSLEQLIAASREDLALCPGLGPQKVRALGKNPRSWGKERAPNKHNLRPQSFKVKKEPKTRHSGFRL

SEQ ID NO: 98007 - protein, 92 aa, Homo sapiens
GDELDDLLDSAPETNETVMPSALVRGPLQTASVSPSMPFSASLLGTLPIGARYAPPPSFSEFYPPLTSSLEDFCSSLNSFSMSESKRDEWTR

SEQ ID NO: 98008 - protein, 325 aa, Homo sapiens
MEPSALGPWSLFPDLAPRDQEGQVLAPRRCFRRECGQNEKVVIMCASSDTIRSIMLVAHRHGMTSGDYAFFNIELFNSSSYGDGSWKRGDKHDFEAKQAYSSLQTVTLLRTVKPEFEKFSMEVKSSVEKQGLNMEDYVNMFVEGFHDAILLYVLALHEVLRAGYSKKDGGKIIQQTWNRTFEGIAGQVSIDANGDRYGDFSVIAMTDVEAGTQEVIGDYFGKEGRFEMRPNVKYPWGPLKLRIDENRIVEHTNSSPCKSSGGLEESAVTGIVVGALLGAGLLMAFYFFRKKYRITIERRTQQEESNLGKHRELREDSIRSHFSVA

SEQ ID NO: 98009 - protein, 11 aa, Homo sapiens
MVKLSIVLTPQ

SEQ ID NO: 98010 - protein, 273 aa, Homo sapiens
MGLQFPECTKAGTRPRGIEASKELQQAQTTRPESTQIQPQPGFCIKTNSSEGKVFINICHSPSIPPPADVTEEELLQMLEEDQAGFRIPMSLGEPHAELDAKGQGCTAYDVAVNSDFYRRMQNSDFLRELVITIAREGLEDKYNLQLNPEWRMMKNRPFMGSISQQNIRSEQRPRIQELGDLYTPAPGRAESGPEKPHLNLWLEAPDLLLAEVDLPKLDGALGLSLEIGENRLVMGGPQQLYHLDAYIPLQINSHESKAAFHRKRKQLMVAMP

SEQ ID NO: 98011 - protein, 59 aa, Homo sapiens
MDFNGLADPYVKLHLLPGACKANKLKTKTQRNTLNPVWNEDLTYSGITDDDITHKDRRL

SEQ ID NO: 98012 - protein, 86 aa, Homo sapiens
MELILSTSPAELTLDPACQPKLPLDSTCQPEMTFNPGPTELTLDPEHQPEETPAPSLAELTLEPVHRRPELLDACADLINDQWPRS

SEQ ID NO: 98013 - protein, 67 aa, Homo sapiens
MAGASVNRVVSPGPLHCLKAIYFAAYSNCKEKLNDVFDPDSTQVHMISAAMAGFTAITATNPIWLIK

SEQ ID NO: 98014 - protein, 73 aa, Homo sapiens
  MOD_RES (1)..(1): Any amino acid
XICLWDLKKGSQKELLNLTQQDYVNRIEELNQSLKDAWASDQKVKALKIVIQVSSSDPPPPPRISYVKFHCET

SEQ ID NO: 98015 - protein, 127 aa, Homo sapiens
MAGGKAGKDSGKAKTKAVSRSQRAGLQFPVGRIHRHLKSRTTSHGRVGATAAVYSAAILEYLTAEVLELAGNASKDLKVKRITPRHLQLAIRGDEELDSLIKATIAGGVIPHIHKSLIGKKGQQKTV

SEQ ID NO: 98016 - protein, 185 aa, Homo sapiens
  MOD_RES (1)..(1): Any amino acid
XTSAPPTLGQPKGVSASQDRKIPPPIGTERLARIRQGGSVAQAPAGTSFVAPVGHSGIWSFGVNAVSEGLSGWSQSVMGNHPMHQQLSDPSTFSQHQPMERDDSGMVAPSNIFHQPMASGFVDFSKGLPISMYGGTIIPSHPQLADVPGGPLFNGLHNPDPAWNPMIKVIQNSTECTDAQQVKWA

SEQ ID NO: 98017 - protein, 196 aa, Homo sapiens
GGETRDQLTVYLGKRDFVDHLDKVDPVDGVVLVDPDYLKDRKVFVTLTCAFRYGREDLDVLGLSFRKDLFIATYQAFPPVPNPPRPPTRLQDRLLRKLGQHAHPFFFTIPQNLPCSVTLQPGPEDTGKACGVDFEIRAFCAKSLEEKSHKRNSVRLVIRKVQFAPEKPGPQPSAETTRHFLMSDRSLHLEASLDKE

SEQ ID NO: 98018 - protein, 115 aa, Homo sapiens
  MOD_RES (1)..(1): Any amino acid
XRYKAGEKEPDPKTWKANFRCAMNSLPDIEEVKDQSRNKGSSAVRVYRMLPPLTKNQRKESRSPAEMLRARPRGSHVGIPALIPSLMDSAAPLCLMTTAATQFQATCRTWRWSRP

SEQ ID NO: 98019 - protein, 173 aa, Homo sapiens
  MOD_RES (1)..(1): Any amino acid
XPAKGRTVLEEKVSVAFRQEVVVKERLELEVVEAEVEEIPEEEEFHEVEEYFEEGEFHEVEEFIKLEQHRVEEEHRVEKVHRVIEVFEAEEVEVFEKPKAPPKGPEISEKIIPPKKPPTKVVPRKEPPAKVPEVPKKIVVEEKVRVPEEPRVPPTKAPEVPKKIVPEEKVREA

SEQ ID NO: 98020 - protein, 30 aa, Homo sapiens
KRARLVRVSSPEGWARILGGGFLGPLLPVL

SEQ ID NO: 98021 - protein, 281 aa, Homo sapiens
MQTPRASPPRPALLLLLLLLGGAHGLFPEEPPPLSVAPRDYLNHYPVFVGSGPGRLTPAEGADDLNIQRVLRVNRTLFIGDRDNLYRVELEPPTSTELRYQRKLTWRSNPSDINVCRMKGKQEGECRNFVKVLLLRDESTLFVCGSNAFNPVCANYSIDTLQPVGDNISGMARCPYDPKHANVALFSDGMLFTATVTDFLAIDAVIYRSLGDRPTLRTVKHDSKWFKEPYFVHAVEWGSHVYFFFREIAMEFNYLEKGLLSSHDQALRLKTSTEQPWSTQP

SEQ ID NO: 98022 - protein, 197 aa, Homo sapiens
  MOD_RES (1)..(1): Any amino acid
XLPLPPQLYRLQQHVKDKKLFKPPVLVFVDCKLGADLLSEAVQKITGLKSISIHSEKSQIERKNILKGLLEGDYEVVVSTGVLGRGLDLISVRLVVNFDMPSSMDEYVHQIGRVGRLGQNGTAITFINNNSKRLFWDIAKRVKPTGSILPPQLLNSPYLHDQKRKEQQKDKQTQNDLVTGANLMDIIRKHDKSNSQK

SEQ ID NO: 98023 - protein, 92 aa, Homo sapiens
MELCEFAFNMKKDEVCVNPYHYQRVETPVLPPVLVPRHTEIPAEFPPLDDYSHSIPENTNFPAGIEPQSNIPETPPPGYLSEDGETSDHQMN

SEQ ID NO: 98024 - protein, 40 aa, Homo sapiens
MGLLSAPPCTQRITWKGLLLTGHSLDSALSLEVTGSSQPL

SEQ ID NO: 98025 - protein, 231 aa, Homo sapiens
RMRGHYHCLRTGCYFVTNITTKLPWHIKKHEKAERRAANGFKYFTKREECGRLGCKYNQVNSHFHCIREGCQFSFLLKHQMTSHARKHMRRMLGKNFDRVPPSQGPPGLMDAETDECMDYTGCSPGAMSSESSTMDRSCSSTPVGNESTAAGCPAPPPPPLPPPAAAGDEAARTAPQPPATPSFSPATLRPPLPPLPCLFSPSCLSYSLLSATLGAGRGLAHPTCSPPSFP

SEQ ID NO: 98026 - protein, 76 aa, Homo sapiens
MAAATGDPGLSKLQFAPFSSALDVGFWHELTQKKLNEYRLDEAPKDIKGYYYNGDSAGLPARLTLEFSAFDIYGNP

SEQ ID NO: 98027 - protein, 199 aa, Homo sapiens
MLKKQSAGLVLWGAILFVAWNALLLLFFWTRPAPGRPPSVSALDGDPASLTREVIRLAQDAEVELERQRGLLQQIGDALSSQRGRVPTAAPPAQPRVPVTPAPAVIPILVIACDRSTVRRCLDKLLHYRPSAELFPIIVSQDCGHEETAQAIASYGSAVTHIRQPDLSSIAVPPDHRKFQGYYKIARHYRWALGQVFRQ

SEQ ID NO: 98028 - protein, 169 aa, Homo sapiens
MYQTVGHHAIDLYAEAMALPLYRRTIRGRSLDTRQVYTKCEGDEVEDLYELLKLVKEKEEVEGISVGAILSDYQRIRVENVCKRLNLQPLAYLWQRNQEDLLREMISSNIQAMIIKVAALGLDPDKHLGKTLDQMEPYLIELSKKYGVHVCGEGGEYETFTLDCPLFKK

SEQ ID NO: 98029 - protein, 28 aa, Homo sapiens
MGRKKIQITRIMDERNRQVTFTKRKFGL

SEQ ID NO: 98030 - protein, 459 aa, Homo sapiens [sequence omitted]

SEQ ID NO: 98031 - protein, 340 aa, Homo sapiens
MRRRAARGPGPPPPGPGLSRLPLPLLLLLALGTRGGCAAPAPAPRAEDLSLGVEWLSRFGYLPPADPTTGQLQTQEELSKAITAMQQFGGLEATGILDEATLALMKTPRCSLPDLPVLTQARRRRQAPAPTKWNKRNLSWRVRTFPRDSPLGHDTVRALMYYALKVWSDIAPLNFHEVAGSAADIQIDFSKADHNDGYPFDGPGGTVAHAFFPGHHHTAGDTHFDDDEAWTFRSSDAHGMDLFAVAVHEFGHAIGLSHVAAAHSIMRPYYQGPVGDPLRYGLPYEDKVRVWQLYGVRESVSPTAQPEEPPLLPEPPDNRSSAPNWIPSEVVLRAGIARGR

SEQ ID NO: 98032 - protein, 42 aa, Homo sapiens
MADGGSERADGRIVKMEVDYSATVDQRLPECAKLAKACLYRY

SEQ ID NO: 98033 - protein, 90 aa, Homo sapiens
  MOD_RES (1)..(1): Any amino acid
XENILDPRLLIAFQNRERQEQLMGYRKRGPKPKPLVVQTSHLLPPMRQLRTWWGLGRSRNSRHAVGLSPPSSHPCTRSLRCLPLPVVPMS

SEQ ID NO: 98034 - protein, 109 aa, Homo sapiens
MNGYAEFPPSPSNPTKEPVEPQPSQVPLQEDVDMSSGSSGHETNENCSTGRDSQGSDCDDSGKELGMLVEPPDARQSPDTFSLMMAKSEHNPSTSGCSSDQSSKVDTHK

SEQ ID NO: 98035 - protein, 181 aa, Homo sapiens
  MOD_RES (1)..(1): Any amino acid
XGGADTDYADGSEDKVVEVAEEEEVAEVEEEEADDDEDDEDGDEVEEEAEEPYEEATERTTSIATTTTTTTESVEEVVRVSQSLLKTTQEPLARDPVKLPTTAASTPDAVDKYLETPGDENEHAHFQKAKERLEAKHRERMSQVMREWEEAERQAKNLPKADKKAVIQHFQEKVESLEQEA

SEQ ID NO: 98036 - protein, 70 aa, Homo sapiens
  MOD_RES (1)..(1): Any amino acid
XQRNMMASIQSFSAMALLFYTVFMFVIVLSSLKHGLFSGQWLRRVSYVRWEGVFRCIPIFGMSFACQSAL

SEQ ID NO: 98037 - protein, 945 aa, Homo sapiens
MLNDGKEKYEKEKIKSISSEHVNEEKAEEHMDLRLKHCLAYVLHTSGTTGIPKIVRVPHKCIVPNIQHFRVLFDITQEDVLFLASPLTFDPSVVEIFLALSSGASLLIVPTSVKLLPSKLASVLFSHHRVTVLQATPTLLRRFGSQLIKSTVLSATTSLRVLALGGEAFPSLTVLRSWRGEGNKTQIFNVYGITEVSSWATIYRIPEKTLNSTLKCELPVQLGFPLLGTVVEVRDTNGFTIQEGSGQVFLGGRNRVCFLDDEVTVPLGTMRATGDFVTVKDGEIFFLGRKDSQIKRHGKRLNIELVQQVAEELQQVESCAVTWYNQEKLILFMVSKDASVKEYIFKELQKYLPSHAVPDELVLIDSLPFTSHGKIDVSELNKIYLNYINLKSENKLSGKEDLWEKLQYLWKSTLNLPEDLLRVPDESLFLNSGGDSLKSIRLLSEIEKLVGTSVPGLLEIILSSSILEIYNHILQTVVPDEDVTFRKSCATKRKLSDINQEEASGTSLHQKAIMTFTCHNEINAFVVLSRGSQILSLNSTRFLTKLGHCSSACPSDSVSQTNIQNLKGLNSPVLIGKSKDPSCVAKVSEEGKPAIGTQKMELHVRWRSDTGKCVDASPLVVIPTFDKSSTTVYIGSHSHRMKAVDFYSGKVKWEQILGDRIESSACVSKCGNFIVVGCYNGLVYVLKSNSGEKYWMFTTEDAVKSSATMDPTTGLIYIGSHDQHAYALDIYRKKCVWKSKCGGTVFSSPCLNLIPHHLYFATLGGLLLAVNPATGNVIWKHSCGKPLFSSPQCCSQYICIGCVDGNLLCFTHFGEQVWQFSTSGPIFSSPCTSPSEQKIFFGSHDCFIYCCNMKGHLQWKFETTSRVYATPFAFHNYNGSNEMLLAAASTDGKVWILESQSGQLQSVYELPGEVFSSPVVLESMLIIGCRDNYVYCLDLLGGNQK

SEQ ID NO: 98038 - protein, 286 aa, Homo sapiens
MSPHPTALLGLVLCLAQTIHTQEDLPRPSISAEPGTVIPLGSHVTFVCRGPVGVQTFRLERESRSTYNDTEDVSQASPSESEARFRIDSVSEGNAGPYRCIYYKPPKWSEQSDYLELLVKETSGGRDSPDTEPGSSAGPTQRPSDNSHNEHAPASQGLKAEHLYILIGVSVVFLFCLLLLVLFCLHRQNQIKQGPPRSKDEEQKPQQRPDLAVDVLERTADKATVNGLPEKDRETDTSALAAGSSQEVTYAQLDHWALTQRTARAVSPQSTKPMAESITYAAVARH

SEQ ID NO: 98039 - protein, 498 aa, Homo sapiens
MAAGGDHGSPDSYRSPLASRYASPEMCFVFSDRYKFRTWRQLWLWLAEAEQTLGLPITDEQIQEMKSNLENIDFKMAAEEEKRLRHDVMAHVHTFGHCCPKAAGIIHLGATSCYVGDNTDLIILRNALDLLLPKLARVISRLADFAKERASLPTLGFTHFQPAQLTTVGKRCCLWIQDLCMDLQNLKRVRDDLRFRGVKGTTGTQASFLQLFEGDDHKVEQLDKMVTEKAGFKRAFIITGQTYTRKVDIEVLSVLASLGASVHKICTDIRLLANLKEMEEPFEKQQIGSSAMPYKRNPMRSERCCSLARHLMTLVMDPLQTASVQWFERTLDDSANRSVAQGHHIHQVEWRRICLAEAFLTADTILNTLQNISEGLVVYPKVIERRIRQELPFMATENIIMAMVKAGGSRQDCHEKIRVLSQQAASVVKQEGGDNDLIERIQVDAYFSPIHSQLDHLLDPSSFTGRASQQVQRFLEEEVYPLLKPYESVMKVKAELCL

SEQ ID NO: 98040 - protein, 158 aa, Homo sapiens
MGLLVFVRNLLLALCLFLVLGFLYYSAWKLHLLQWEEDSNSVVLSFDSAGQTLGSEYDRLGFLLNLDSKLFSKPAPMFLDDSFRKWARIREFVPPFGIKGQDNLIKAILSVTKEYRLTPALDSLRCRRCIIVGNGGVLANKSLGSRIDDYDIVVRPRL

SEQ ID NO: 98041 - protein, 220 aa, Homo sapiens
MFSEQAAQRAHTLLSPPSANNATFARVPVATYTNSSQPFRLGERSFSRQYAHIYATRLIQMRPFLENRAQQHWGSGVGVKKLCELQPEEKCCVVGTLFKAMPLQPSILREVSEEHNLLPQPPRSKYIHPDDELVLEDELQRIKLKGTIDVSKLVTGTVLAVFGSVRDDGKFLVEDYCFADLAPQKPAPPLDTDRFVLLVSGLGLGGGGGESLLGTQLLVD

SEQ ID NO: 98042 - protein, 86 aa, Homo sapiens
MASMRESDTGLWLHNKLGATDELWAPPSIASLLTAAVIDNIRLCFHGLSSAVKLKLLLGTLHLPRRTVDEWVSVKRLPCCHWSAST

SEQ ID NO: 98043 - protein, 172 aa, Homo sapiens
KLESVWLWRLLKITNFFLYSQKMFLTNINIFSLLWSAMSVETIEGFQCSPYPEVDHFVLSLVNKDGIKGGIRRWNYFFPEELLVYDICKYRWCENIGRAHKSNNIMILVDLKNEVWYQKCHDPVCKAENFKSDCFPLPAEVCLLFLFKEEEEFTTDEADETRSNETQNPHKP

SEQ ID NO: 98044 - protein, 66 aa, Homo sapiens
MATLPSAERRAFALKINRYSSAEIRKQFTLPPNLGQYHRQSISTSGFPSLQLRRSFSMLSRLVLNS

SEQ ID NO: 98045 - protein, 69 aa, Homo sapiens
MDSLEWNWALVYELSGEHHDEEWSVKTYQEVAQKFVETHPEFIGIKIIYSDHRWGMRTLATPCMTTRKL

SEQ ID NO: 98046 - protein, 149 aa, Homo sapiens
MIEESGNKRKTMAEKRQLFIEMRAQNFDVIRLSTYRTACKLRFVQKRCNLHLVDIWNMIEAFRDNGLNTLDHTTEISVSRLETVISSIYYQLNKRLPSTHQISVEQSISLLLNFMIAAYDSEGRGKLTVFSVKAMLATMCGGKMLDKLR

SEQ ID NO: 98047 - protein, 750 aa, Homo sapiens
DAFVNSQEWTLSRSVPELKVGIVGNLASGKSALVHRYLTGTYVQEESPEGGRFKKEIVVDGQSYLLLIRDEGGPPEAQFAMWVDAVIFVFSLEDEISFQTVYHYYSRMANYRNTSEIPLVLVGTQDAISSANPRVIDDARARKLSNDLKRCTYYETCATYGLNVERVFQDVAQKIVATRKKQQLSIGPCKSLPNSPSHSSVCSAQVSAVHISQTSNGGGSLSDYSSSVPSTPSTSQKELRIDVPPTANTPTPVRKQSKRRSNLFTSRKGSDPDKEKKGLESRADSIGSGRAIPIKQGMLLKRSGKSLNKEWKKKYVTLCDNGVLTYHPSLHDYMQNVHGKEIDLLRTTVKVPGKRPPRATSACAPISSPKTNGLSKDMSSLHISPNSDTGLGDSVCSSPSISSTTSPKLDPPPSPHANRKKHRRKKSTSNFKADGLSGTAEEQEENFEFIIVSLTGQTWHFEATTYEERDAWVQAIESQILASLQSCESSKNKSRLTSQSEAMALQSIRNMRGNSHCVDCETQNPNWASLNLGALMCIECSGIHRNLGTHLSRVRSLDLDDWPVELIKVMSSIGNELANSVWEESSQGRTKPSVDSTREEKERWIRAKYEQKLFLAPLPCTELSLGQHLLRATADEDLRTAILLLAHGSRDEVNETCGEGDGRTALHLACRKGNVVLAQLLIWYGVDVTARDAHGNTALAYARQASSQECIDVLLQYGCPDERFVLMATPNLSRRNNNRNNSSGRVPTII

SEQ ID NO: 98048 - protein, 247 aa, Homo sapiens
MLHTTQLYQHVPETRWPIVYSPRYNITFMGLEKLHPFDAGKWGKVINFLKEEKLLSDSMLVEAREASEEDLLVVHTRRYLNELKGNGHERDFMDDKRVYIMDVYNRHIYPGDRFAKQAIRRKVELEWGTEDDEYLDKVERNIKKSLQEHLPDVVVYNAGTDILEGDRLGGLSISPAGIVKRDELVFRMVRGRRVPILMVTSGGYQKRTARIIADSILNLFGLGLIGPESPSVSAQNSDTPLLPPAVP

SEQ ID NO: 98049 - protein, 156 aa, Homo sapiens
MEELGPQAHANDPECGQRPVPALSHHGSQRVVLLQTATLLGVLLLGYGYFWLLVPNPEARLQQLGLFCSVFTISMYLSPLADLAKVIQTKSTQCLSYPLTIATLLTSASWCLYGFRLRDPYIMVSNFPGIVTSFIRFWLFWKYPQEQDRNYWLLQT

SEQ ID NO: 98050 - protein, 371 aa, Homo sapiens
  MOD_RES (1)..(1): Any amino acid
XTMNSLSEANTKFMFDLFQQFRKSKENNIFYSPISITSALGMVLLGAKDNTAQQISKVLHFDQVTENTTEKAATYHVDRSGNVHHQFQKLLTEFNKSTDAYELKIANKLFGEKTYQFLQEYLDAIKKFYQTSVESTDFANAPEESRKKINSWVESQTNEKIKNLFPDGTIGNDTTLVLVNAIYFKGQWENKFKKENTKEEKFWPNKDVQAKVLEIPYKGKDLSMIVLLPNEIDGLQKLEEKLTAEKLMEWTSLQNMRETCVDLHLPRFKMEESYDLKDTLRTMGMVNIFNGDADLSGMTWSHGLSVSKVLHKAFVEVTEEGVEAAAATAVVVVELSSPSTNEEFCCNHPFLFFIRQNKTNSILFYGRFSSP

SEQ ID NO: 98051 - protein, 122 aa, Homo sapiens
MDCLCIVTTKKYRYQDEDTPPQEHISPQITNEVIGPELVHVSEKNLSEIENVHGFVSHSHISPIKVNGTDADYEYEEITLERGNSGLGFSIAGGTDNPHIGDDSSIFITKIITGGAAAQDGR

SEQ ID NO: 98052 - protein, 127 aa, Homo sapiens
MIPIWKQQARPGDGPVIWDYHVVLLHVSSGGQNFIYDLDTVLPFPCLFDTYVEDAFKSDDDIHPQFRRKFRVIRADSYLKNFASDRSHMKDSSGNWREPPPPYPCIETGDSKMNLNDFISMDPKMKW

SEQ ID NO: 98053 - protein, 257 aa, Homo sapiens
MGVFKKASPNGKLTVYLGKRDFVDHIDLVDPVDGVVLVDPEYLKERRVYVTLTCAFRYGREDLDVLGLTFRKDLFVANVQSFPPAPEDKKPLTRLQERLIKKLGEHAYPFTFEIPPNLPCSVTLQPGPEDTGKACGVDYEVKAFCAENLEEKIHKRNSVRLVIRKVQYAPERPGPQPTAETTRQFLMSDKPLHLEASLDKEIYYHGEPISVNVHVTNNTNKTVKKIKISVRQYADICLFNTAQYKCPVAMEEADDTV

SEQ ID NO: 98054 - protein, 707 aa, Homo sapiens
MPSEGRCWETLKALRSSDKGRLCYYRDWLLRREDVLEECMSLPKLSSYSGWVVEHVLPHMQENQPLSETSPSSTSASALDQPSFVPKSPDASSAFSPASPATPNGTKGKDESQHTESMVLQSSRGIKVEGCVRMYELVHRMKGTEGLRLWQEEQERKVQALSEMASEQLKRFDEWKELKQHKEFQDLREVMEKSSREALGHQEKLKAEHRHRAKILNLKLREAEQQRVKQAEQERLRKEEGQIRLRALYALQEEMLQLSQQLDASEQHKALLKVDLAAFQTRGNQLCSLISGIIRASSESSYPTAESQAEAERALREMRDLLMNLGQEITRACEDKRRQDEEEAQVKLQEAQMQQGPEAHKEPPAPSQGPGGKQNEDLQVKVQDITMQWYQQLQDASMQCVLTFEGLTNSKDSQAKKIKMDLQKAATIPVSQISTIADCRSLVFMAGSKLKEIFDKIHSLLSGKPVQSGGRSVSVTLNPQGLDFVQYKLAEKFVKQGEEEVASHHEAAFPIAVVASGIWELHPRVGDLILAHLHKKCPYSVPFYPTFKEGMALEDYQRMLGYQVKDSKVEQQDNFLKRMSGMIRLYAAIIQLRWPYGNRQEIHPHGLNHGWRWLAQILNMEPLSDVTATLLFDFLEVCGNALMKQYQVQFWKMLILIKEDYFPRIEAITSSGQMGSFIRLKQFLEKCLQHKDIPVPKGFLTSSFWRS

SEQ ID NO: 98055 - protein, 115 aa, Homo sapiens
MRTLFNLLWLALACSPVHTTLSKSDAKKAASKTLLEKSQFSDKPVQDRGLVVTDLKAESVVLEHRSYCSAKARDRHFAGDVLGYVTPWNSHGYDVTKVFGSKFTQISPVWLQLKR

SEQ ID NO: 98056 - protein, 102 aa, Homo sapiens
MAVTKELLQMDLYALLGIEEKAADKEIGCPSLYAHQECVEYLSSSGCRESGVLCSCLLQQPLDICSGEVEHLAGGGPSSCAGRQWLTPSMALASSIASLPGG

SEQ ID NO: 98057 - protein, 133 aa, Homo sapiens
MAARGRRAEPQGREAPGPAGGGGGGSRWAESGSGTSPESGDEEVSGAGSSPVSGGVNLFANDGSFLELFKRKMEEEQRQRQEEPPPGPQRPDQSAAAAGPGDPKRKGGPGSTLSFVGRLAELGAASGRATRPG

SEQ ID NO: 98058 - protein, 114 aa, Homo sapiens
  MOD_RES (1)..(1): Any amino acid
XYFCYRWFLLDFKRELLYEDVFAVWEVIWAARHISSEHFVLFIALALVEAYREIIRDNNMDFTDIIKFFNGTSWSSHPGCPEQRCGGPHLCPAHSWRVLRNPGGPSPKAGMSRI

SEQ ID NO: 98059 - protein, 16 aa, Homo sapiens
MLHAVAASRLPVCSQQ

SEQ ID NO: 98060 - protein, 343 aa, Homo sapiens
MDWGTELWDQFEVLERHTQWGLDLLDRYVKFVKERTEVEQAYAKQLRSLVKKYLPKRPAKDDPESKFSQQQSFVQILQEVNDFAGQRELVAENLSVRVCLELTKYSQEMKQERKMHFQEGRRAQQQLENGFKQLENSKRKFERDCREAEKAAQTAERLDQDINATKADVEKAKQQAHLRSHMAEESKNEYAAQLQRFNRDQAHFYFSQMPQIFDKLQDMDERRATRLGAGYGLLSEAELEVVPIIAKCLEGMKVAANAVDPKNDSHVLIELHKSGFARPGDVEFEDFSQPMNRAPSDSSLGTPSDGRPELRGPGRSRTKRWPFGKKNKPSRQPWALYPPCRQW

SEQ ID NO: 98061 - protein, 311 aa, Homo sapiens
  MOD_RES (1)..(1): Any amino acid
XKKVKKGEIRDLKTKTREDPKENRKTKKEKFVESQVESESSVLNDSPFPEDDSEGLHSDSREEKQNTKSARERAGQDMGLEHGFEKPLDSAMSAEEDTDVRGRRKKKTPRKAEDTRENRKLENKNAFLEKKTVPKKQRNQDRSKSAAELEKLMPVSAQTPKGRRLSGEERGLWSTDSAEEDKETKRNESKEKYQKRHDSDKEEKGRKEPKGLKTLKEIRNAFDLFKLTPEEKNDVSENNRKREEIPLDFKTIDDHKTKENKQSLKERRNTRDETDTWAYIAAEGDQEVLDSVCQADENSGEFGIILQNFSR

SEQ ID NO: 98062 - protein, 72 aa, Homo sapiens
MAWKSGGASHSELIHNLRKNGIIKTDKVFEVMLATDRSHYAKCNPYMDSPQSIADSTGEEIFSCRTLEGLFY

SEQ ID NO: 98063 - protein, 105 aa, Homo sapiens
MRKAGVAHSKSSKDMESHVFLKAKTRDEYLSLVARLIIHFRDIHNKKSQASVSAQLQLQQVALQQQQQQQQFQQQQQAALQQQQQQQQQQQFQAQQSAMQQQFQA

SEQ ID NO: 98064 - protein, 151 aa, Homo sapiens
MDSGTRPVGSCCSSPAGLSREYKLVMLGAGGVGKSAMTMQFISHRFPEDHDPTIEDAYKIRIRIDDEPANLDILDTAGQAEFTAMRDQYMRAGEGFIICYSITDRRSFHEVREFKQLIYRVRRTDDTPVVLVGNKSDLKQLRQVTKEEGLA

SEQ ID NO: 98065 - protein, 52 aa, Homo sapiens
MEGQRQESHATLTLAQAHFNNGEYAEAEALYSAYIRRCACAASSDESPGRIF

SEQ ID NO: 98066 - protein, 98 aa, Homo sapiens
MARTAGDTLDVFTMIDIFKYVIYGIAAAFFVYGILLMVEGFFTTGAIKDLYGDFKITTCGRCVSAWFIMLTYLFMLAWLGVTAFTSLPVYMYFNLWTI

SEQ ID NO: 98067 - protein, 58 aa, Homo sapiens
MVVFGYEAGTKPRDSGVVPVGTEEAPKDTKYISNGDIWNNSWFLWNILKLPVQTLLQG

SEQ ID NO: 98068 - protein, 297 aa, Homo sapiens
MCNQDSESVWSDIECAALVGEDQPLCPDLPELDLSELDVNDLDTDSFLGGLKWCSDQSEIISNQYNNEPSNIFEKIDEENEANLLAVLTETLDSLPVDEDGLPSFDALTDGDVTTDNEASPSSMPDGTPPPQEAEEPSLLKKLLLAPANTQLSYNECSGLSTQNHANHNHRIRTNPAIVKTENSWSNKAKSICQQQKPQRRPCSELLKYLTTNDDPPHTKPTENRNSSRDKCTSKKKSHTQSQSQHLQAKPTTLSLPLTPESPNDPKGSPFENKTIERTLSVELSGTAGVKTNLISK

SEQ ID NO: 98069 - protein, 149 aa, Homo sapiens
QPTPVYTQPVCFAPNMMYPVPVSPGVQPLYPIPMTPMPVNQAKTYRAGKVKYLELELLRYVSTGSLAQQYAHPNATLHPHTPHPQPSATPTGQQQSQHGGSHPAPSPVQHHQHQAAQALHLASPQQQSAIYHAGLAPTPPSMTPASNTQ

SEQ ID NO: 98070 - protein, 111 aa, Homo sapiens
VTYNGVDNNKNKGQLTKHLMITLNIRDRSPLAQMEEERREHVAKMKKMEMEMEQVFEMKVKEKVQKLKDSEAELQRRHEQMKKNLEAQHKELEEKRRQFEDEKANWEAQQR

SEQ ID NO: 98071 - protein, 203 aa, Homo sapiens
MPDPPPTLKPETQPPEKRRRTIEDFNKFCSFVLAYAGYIPPSKEESDWPASGSSSPLRGESAADSDGWDSAPSDLRTIQTFVKKAKSSKRRAAQAGPTQPGPPRSTFSRLQAPDSATLLEKMKLKDSLFDLDGPKVASPLSPTSLTHTSRPPAALTPVPLSQGDLSHPPRKKDRKNRKLGPGAGAGFGVLRRPRPTPGDGEKR

SEQ ID NO: 98072 - protein, 104 aa, Homo sapiens
  MOD_RES (1)..(1): Any amino acid
XNDELEAFKERVRGRAKLRIEKAMKEYEEEERKKRLGPGGLDPVEVYESLPEELQKCFDVKDVQMLQDAISKMDPTVSNPRAPCLPGGPCVSPSPVSQVSEAGW

SEQ ID NO: 98073 - protein, 297 aa, Homo sapiens
MACVGFFLLQGAWPHEGVHRKPSLLAHPGRLVKSEETVILQCWSDVMFEHFLLHREGMFNDTLRLIGEHHDGVSKANFSISRMKQDLAGTYRCYGSVTHSPYQLSAPSDPLDIVIIGLYEKPSLSAQPGPTVLAGENVTLSCSSRSSYDMYHLSREGEAHERRLPAGTKVNGTFQANFPLGPATHGGTYRCFGSFRDSPYEWSKSSDPLLVSVTGNPSNSWPSPTEPSSETGNPRHLHVLIGTSVVKIPFTILLFFLLHRWCSDKKNAAVMDQEPAGNRTVNSEDSDEQDHQEVSYA

SEQ ID NO: 98074 - protein, 47 aa, Homo sapiens
MSRIEKMSILGVRSFGIEDKDKQIITFFSPLTILVGPNGAGKTVSLQ

SEQ ID NO: 98075 - protein, 736 aa, Homo sapiens
MTSQEKTEEYPFADIFDEDETERNFLLSKPVCFVVFGKPGVGKTTLARYITQAWKCIRVEALPILEEQIAAETESGVMLQSMLISGQSIPDELVIKLMLEKLNSPEVCHFGYIITEIPSLSQDAMTTLQQIELIKNLNLKPDVIINIKCPDYDLCQRISGQRQHNNTGYIYSRDQWDPEVIENHRKKKKEAQKDGKGEEEEEEEEQEEEEAFIAEMQMVAEILHHLVQRPEDYLENVENIVKLYKETILQTLEEVMAEHNPQYLIELNGNKPAEELFMIVMDRLKYLNLKRAAILTKLQGAEEEINDTMENDELFRTLASYKLIAPRYRWQRSKWGRTCPVNLKDGNIYSGLPDYSVSFLGKIYCLSSEEALKPFLLNPRPYLLPPMPGPPCKVFILGPQYSGKTTLCNMLAENYKGKVVDYAQLVQPRFDKARETLVENTIAEATAAAIKVVKEKLLRELQARKQAETALREFQRQYEKMEFGVFPMEATHSSIDEEGYIQGSQRDRGSSLVDTEEAKTKSENVLHDQAAKVDKDDGKETGETFTFKRHSQDASQDVKLYSDTAPTEDLIEEVTADHPEVVTMIEETIKMSQDINFEQPYEKHAEILQEVLGEVMEENKDRFPGAPKYGGWIVDNCPIVKELWMALIKKGIIPDLVIYLSDTENNGKCLFNRIYLQKKSEIDSKILERLLEELQKKKKEEEEARKATEEELRLEEENRRLLELMKVKAKGKHRLL

SEQ ID NO: 98076 - protein, 426 aa, Homo sapiens
MQLPRWWELGDPCAWTGQGRGTRRMSPATTGTFLLTVYSIFSKVHSDRNVYPSAGVLFVHVLEREYFKGEFPPYPKPGEISNDPITFNTNLMGYPDRPGWLRYIQRTPYSDGVLYGSPTAENVGKPTIIEITAYNRRTFETARHNLIINIMSAEDFPLPYQAEFFIKNMNVEEMLASEVLGDFLGAVKNVWQPERLNAINITSALDRGGRVPLPINDLKEGVYVMVGADVPFSSCLREVENPQNQLRCSQEMEPVITCDKKFRTQFYIDWCKISLVDKTKQVSTYQEVIRGEGILPDGGEYKPPSDSLKSRDYYTDFLITLAVPSAVALVLFLILAYIMCCRREGVIQLVHHSAIQKSTKELRDMSKNREIAWPLSTLPVFHPVTGEIIPPLHTDNYDSTNMPLMQTQQNLPHQTQIPQQQTTGEC

SEQ ID NO: 98077 - protein, 108 aa, Homo sapiens
  MOD_RES (1)..(1): Any amino acid
XSNFGGGGSYNDFGNYNNQSSNFGPMKGGNFGGRSSGPYGGGGQYFAKPRNQGRSLLLVLSALKNRNSSVQVRGRKERPCEDLYLSHCTSLSLPCSLHELFCSSNSIL

SEQ ID NO: 98078 - protein, 144 aa, Homo sapiens
MGVLQVVKQSVQIPVFVMIRPRGGDFLYSDREIEVMKADIRLAKLYGADGLVFGALTEDGHIDKELCMSLMAICRPLPVTFHRAFDMVHDPMAALETLLTLGFERVLTSGCDSSALEGLPLIKRLIEQAKGRIVVMPGGGITDR

SEQ ID NO: 98079 - protein, 136 aa, Homo sapiens
MRTHTRGAPSVFFIYLLCFVSAYITDENPEVMIPFTNANYDSHPMLYFSRAEVAELQLRAASSHEHIAARLTEAVHTMLSSPLEYLPPWDPKDYSARWNEIFGNNLGALAMFCVLYPENIEARDMAKDYMERMAAQ

SEQ ID NO: 98080 - protein, 745 aa, Homo sapiens
MPCCSHRSCREDPGTSESREMMFQDPVAFEDVAVNFTQEEWTLLDISQKNLFREVMLETFRNLTSIGKKWSDQNIEYEYQNPRRSFRSLIEEKVNEIKEDSHCGETFTQVPDDRLNFQEKKASPEVKSCDSFVCAEVGIGNSSFNMSIRGDTGHKAYEYQEYGPKPYKCQQPKNKKAFRYRPSIRTQERDHTGEKPYACKVCGKTFIFHSSIRRHMVMHSGDGTYKCKFCGKAFHSFSLYLIHERTHTGEKPYECKQCGKSFTYSATLQIHERTHTGEKPYECSKCDKAFHSSSSYHRHERSHMGEKPYQCKECGKAFAYTSSLRRHERTHSGKKPYECKQYGEGLSYLISFQTHIRMNSGERPYKCKICGKGFYSAKSFQTHEKTHTGEKRYKCKQCGKAFNLSSSFRYHERIHTGEKPYECKQCGKAFRSASQLRVHGGTHTGEKPYECKECGKAFRSTSHLRVHGRTHTGEKPYECKECGKAFRYVKHLQIHERTEKHIRMPSGERPYKCSICEKGFYSAKSFQTHEKTHTGEKPYECNQCGKAFRCCNSLRYHERTHTGEKPYECKQCGKAFRSASHLRMHERTHTGEKPYECKQCGKAFSCASNLRKHGRTHTGEKPYECKQCGKAFRSASNLQMHERTHTGEKPYECKECEKAFCKFSSFQIHERKHRGEKPYECKHCGNGFTSAKILQIHARTHIGEKHYECKECGKAFNYFSSLHIHARTHMGEKPYECKDCGKAFS

SEQ ID NO: 98081 - protein, 22 aa, Homo sapiens
  MOD_RES (1)..(1): Any amino acid
XGMEVDTTPTVAGQFEDADVDH

SEQ ID NO: 98082 - protein, 141 aa, Homo sapiens
MLGQKPKTNIAIFCETRAEWMIAAQACFMYNFQLVTLYATLGGPAIVHALNETEVTNIITSKELLQTKLKDIVSLVPRLRHIITVDGKPPTWSEFPKGIIVHTMAAVEALGAKASMENQPHSKPLPSDIAVIMYTSGSTGL

SEQ ID NO: 98083 - protein, 146 aa, Homo sapiens
  MOD_RES (1)..(1): Any amino acid
XQAESSTLSSGISIGSSDGSELSEETSWPAFESSAESEDLAVHLYPGAVTIQGVLRRKTLLKEGKKPTVASWTKYWAALCGTQLFYYAAKSLKATERKHFKSTSNKNVSVIGWMVMMADDPEHPDLFLLTDSEKGNSYKFQAGNRM

SEQ ID NO: 98084 - protein, 141 aa, Homo sapiens
  MOD_RES (1)..(1): Any amino acid
XYIFGFIGASSATMLIFILPAVFYLKLVKKETFRSPQKVGEITGRFQRRLPVISPGTCRRGKSLFLSRMVVYVFKIKPVVHISTQVLLEQCEMMKVYFCCFTSRIRVTACNNHQIVLFPLPSPHPAPPKKVPNICILRTSN

SEQ ID NO: 98085 - protein, 40 aa, Homo sapiens
MTSSKIEMPGEVKADPAALMASLHLLPSPTPNLEIKYTKV

SEQ ID NO: 98086 - protein, 229 aa, Homo sapiens
MKRLAARCFAGLLILSPLTVISDSRPADSGKAIEDGNLEEMEEEVRLKKRKRRRNVDKDPAKEDVEKAKKRRGRPPAEKLSPNPPKLTKQMNAIIDTVINYKDSSGRQLSEVFIQLPSRKELPEYYELIRKPVDFKKIKERIRNHKYRSLGDLEKDVMLLCHNAQTFNLEGSQIYEDSIVLQSVFKSARQKIAKEEESEDESNEEEEEEDEEESESEAKSVKVKIKLNK

SEQ ID NO: 98087 - protein, 116 aa, Homo sapiens
MDHLNEATQGKEHSEMSNNVSDPKGPPAKIARLEQNGSPLGRGRLGSTGAKMQGVPLKHSGHLMKTNLRKGTMLPVFCVVEHYENAIEYDCKEEHAEFVLVRKDMLFNQLIEMALL

SEQ ID NO: 98088 - protein, 229 aa, Homo sapiens
MSTAMGRSPSPKTSLSAPPNSSSTENPKTVAKCQVTPRRNVLQKRPVIVKVLSTTKPFEYETPEMEKKIMFHATVATQTQFFHVKVLNTSLKEKFNGKKIIIISDYLEYDSLLEVNEESTVSEAGPNQTFEVPNKIINRAKETLKIDILHKQASGNIVYGVFMLHKKTVNQKTTIYEIQDDRGKMDVVGTGQCHNIPCEEGDKLQLFCFRLRKKNQMSKLISEMHSFIQ

SEQ ID NO: 98089 - protein, 86 aa, Homo sapiens
MSYMLPHLHNGWQVDQAILSEEDRVVVIRFGHDWDPTCMKMDEVLYSIAEKFCRLYRKCGTGICFWGGLRTFQSWQKAKGNRHVAR

SEQ ID NO: 98090 - protein, 1937 aa, Homo sapiens
MKQRKGQGSGGSRGRKKRGLSDISPSTSLPPLVEGQLRCFLKLTVNRVIWKIAKPPTCVLVRVRWWGETSDGTLFCPRDALQTEPKAVRTTTRYAIRCGPKQFTSYLTDMAVLVLEVITKLDGLPIGRVQINGLAQLSPTHQINGFFTIVSSTSKKLGELQVSLALEPLSETYDSYHPLPTTDMTENVLLSKQGFRENTEPSSTQFQVPSRPRDIHTIKIDGKELAANSSRSTTPRGKDHVCFAENPDTIKDSSFGLQHSLNSGQSLESVTLKGRAPRKQMSLLNSSEFQPQIRTVAKSHSDSCILSSNNLPTKDLLSALLEQGNKLRNAMVISAMKSSPETSMLLDQVHPPINEDSLRASTQIRAFSRNRFKDHIEDHLLPSTENTFWRHDTKADTRAIQLLLGSAELSQGNFWDGLGSPPDSPSPGSDVYCISELNDPQYDQSLLENLFYTAPKSDTSISDFLSEEDDIVPSKKISQSTALARSSKVLESSDHKLKKRSAGKRNRNLVEQQMLSETPEDAQTMTLSVDRLALLGRTHSVRIIIETMGVPPDSPQMTPGKKSYAGPPPKVTTAKKRTFFVEYHFPVGFSESGLGKTALITEVVRLASSKITDGKVKFQQRFVFPVQFGGPMIEHWWNSNLTFQIYVKKTPQKKPEVIGSVSLSLRAVIQSELLSFSDQLPVQQENGQSPFGPLKVTMELITDNKDFTGINTKLSGNTHYTPLCAPTSPNKALPELNQDMTCTKNPQNLNQIHEETAKKAQNLVLPNRKSPSPVAPHPSTFVATPASHNLVNQTNGTTKESALLLHVLLMVPDGKDFISGESEKQSPCNVYLNCKLFSTEEVTRSVIAWGTTQPVFNFSQVIPVSLSSKYLERLKNNVMVIETWNKVRSPGQDKLLGLVKLPLHQFYMSFKDAKISRLLLDAQYPVVAVDSYMPVIDVFSGHQNGSLRVFLAMGSSNQIMALQRLKNEEGTLPPFSPRPAHFLDQPTAASVAMAEDRGNGLMEHCFEIHIEMVKGLAPLQATVWGEADCYVQYYFPVQHSQSSVLKGPEFLENGITLKPFRTATTLCVPDPIFNSEHHHSLLLPAEVPVQRLLLSAFSAQGLVPGGGVQFEIWCRYYYPNVRDQKVAKGTLPLSRICAMVTTQHREDVGIQTFNLPLTPRIENRKELRNQSSGLLDVGLRYRRSPRTAEGVLAARTVSISVQIIRACGLQAAAKALAEREPALQFSATVGVNASVTTHLSFLPQGEQRRTHPVACSFCPEFSHHVEFTCNLVTQHCSGEACFLAELLEFAEVIFAVYHENTKSASDIISIESCKEYLLGVVKVPTKELLIKRSGITGWYPIILPEDGGLPHGLELMQKIVGGLELSISFTHRGDRERVLEAAEHLGWSFENSLKDFVRMDEGEPATVTISTPRLWLPIHCVLLAGHNHIHKNTYCYLRYKFYDHEAFWTPLKKPKESVNKKQIMVTFKASKRAEVTRGPSLLWYFREERLEIQVWRAYGNDSVERPHQTDSWIGSAYVDLARLGERSARTLTVSGVYPLFGRNASNLSGAALRVHVVLSSLSSHLEPTHELDSMDCSSHSESEQLPRRNDEVQLSPPEVISCHQKSPASTQVPCSSTTAEVRLTQEGPADLDGTFAVSILVERAMHLSLKGSPLTERKVSIPSCCVSFATADESSPVYTQVVENTDSPIWNFQQQSRLSKELLLDPQQTLVFKVWHKGDEERVIGFASVDLSPLLSGFQFVCGWYNITDFSGECQGQIKVAVSPLESLIHFKEERQARRGVETSKSLIPIYSPFSFPASDTYAAFSSHMARQTLDQLAHASSKELDFSSPGRSDTTRSQASRHEEHVQNIRRFHESLHLQGEAPLPCDDKLTTSPLSSQTSILTSLSPQTQTAISQHQESCRDHLGPGASSLDPGSQCILEKSSNLVLQVSSLITDT

SEQ ID NO: 98091 - protein, 1009 aa, Homo sapiens
MGRGAGREYSPAATTAENGGGKKKQKEKELDELKKEVAMDDHKLSLDELGRKYQVDLSKGLTNQRAQDVLARDGPNALTPPPTTPEWVKFCRQLFGGFSILLWIGAILCFLAYGIQAAMEDEPSNDNLYLGVVLAAVVIVTGCFSYYQEAKSSKIMDSFKNMVPQQALVIREGEKMQINAEEVVVGDLVEVKGGDRVPADLRIISSHGCKVDNSSLTGESEPQTRSPEFTHENPLETRNICFFSTNCVEGTARGIVIATGDRTVMGRIATLASGLEVGRTPIAMEIEHFIQLITGVAVFLGVSFFVLSLILGYSWLEAVIFLIGIIVANVPEGLLATVTVCLTLTAKRMARKNCLVKNLEAVETLGSTSTICSDKTGTLTQNRMTVAHMWFDNQIHEADTTEDQSGATFDKRSPTWTALSRIAGLCNRAVFKAGQENISVSKRDTAGDASESALLKCIELSCGSVRKMRDRNPKVAEIPFNSTNKYQLSIHEREDSPQSHVLVMKGAPERILDRCSTILVQGKEIPLDKEMQDAFQNAYMELGGLGERVLGFCQLNLPSGKFPRGFKFDTDELNFPTEKLCFVGLMSMIDPPRAAVPDAVGKCRSAGIKVIMVTGDHPITAKAIAKGVGIISEGNETVEDIAARLNIPMSQVNPREAKACVVHGSDLKDMTSEQLDEILKNHTEIVFARTSPQQKLIIVEGCQRQGAIVAVTGDGVNDSPALKKADIGIAMGISGSDVSKQAADMILLDDNFASIVTGVEEGRLIFDNLKKSIAYTLTSNIPEITPFLLFIIANIPLPLGTVTILCIDLGTDMVPAISLAYEAAESDIMKRQPRNSQTDKLVNERLISMAYGQIGMIQALGGFFTYFVILAENGFLPSRLLGIRLDWDDRTMNDLEDSYGQEWTYEQRKVVEFTCHTAFFASIVVVQWADLIICKTRRNSVFQQGMKNKILIFGLLEETALAAFLSYCPGMGVALRMYPLNLLIFIYDEVRKLILRRYPGGWVEKETYY

SEQ ID NO: 98092 - protein, 584 aa, Homo sapiens
MAALSGGGGGGAEPGQALFNGDMEPEAGAGAGAAASSAADPAIPEEVWNIKQMIKLTQEHIEALLDKFGGEHNPPSIYLEAYEEYTSKLDALQQREQQLLESLGNGTDFSVSSSASMDTVTSSSSSSLSVLPSSLSVFQNPTDVARSNPKSPQKPIVRVFLPNKQRTVVPARCGVTVRDSLKKALMMRGLIPECCAVYRIQDGEKKPIGWDTDISWLTGEELHVEVLENVPLTTHNFVRKTFFTLAFCDFCRKLLFQGFRCQTCGYKFHQRCSTEVPLMCVNYDQLDLLFVSKFFEHHPIPQEEASLAETALTSGSSPSAPASDSIGPQILTSPSPSKSIPIPQPFRPADEDHRNQFGQRDRSSSAPNVHINTIEPVNIDDLIRDQGFRGDGGSTTGLSATPPASLPGSLTNVKALQKSPGPQRERKSSSSSEDRNRMKTLGRRDSSDDWEIPDGQITVGQRIGSGSFGTVYKGKWHGDVAVKMLNVTAPTPQQLQAFKNEVGVLRKTRHVNILLFMGYSTKPQLAIVTQWCEGSSLYHHLHIIETKFEMIKLIDIARQTAQGMERFEESWVNFTSSRGKTQRK

SEQ ID NO: 98093 - protein, 127 aa, Homo sapiens
MAEAGTGLLPATVQPFHLRGMSSTFSQRSRDIFDCLEGAARRAPSSVAHTSMSDNGGFKRPLAPSGRSPVEGLGRAHRSPASPRVPPVPDYVAHPERWTKYSLEDVTEEAESRPLPEQEQQPRGPRC

SEQ ID NO: 98094 - protein, 176 aa, Homo sapiens
MEASRTNIDESAMPPPPPQGVKRKAGQIDPEPVMPPQQVEQMEIPPVELPPEEPPNICQLIPELELLPEKEKEKEKEKEDDEEEEDEDASGGDQDQEERRWNKRTQQMLHGLQRALAKTGAESISLLELCRNTNRKQAAAKFYSFLVLKKQQAIELTQEEPYSDIIATPGPRFHII

SEQ ID NO: 98095 - protein, 88 aa, Homo sapiens
  MOD_RES (1)..(1): Any amino acid
XPQKGNLLIYTEFGKMLVQPNEICVIQRGMRFSIDVFEETRGYILEVYGVHFELPDLGPIDSLGLPKRMSPRSMLWPGTGIIHPTSTT

SEQ ID NO: 98096 - protein, 268 aa, Homo sapiens
MGKDFRYYFQHPWSRMIVAYLVIFFNFLIFAEDPVSHSQTEANVIVVGNCFSFVTNKYPRGVGWRILKVLLWLLAILTGLIAGKFLFHQRLFGQLLRLKMFREDHGSWMTMFFSTILFLFIFSHIYNTILLMDGNMGAYIITDYMGIRNESFMKLAAVGTWMGDFVTAWMVTDMMLQDKPYPDWGKSARAFWKKGNVRITLFWTVLFTLTSVVVLVITTDWISWDKLNRGFLPSDEVSRAFLASFILVFDLLIVMQANGLTMELSSSS

SEQ ID NO: 98097 - protein, 36 aa, Homo sapiens
MLGTVKMEGHETSDWNSYYADTQELAITLQKFNYHY

SEQ ID NO: 98098 - protein, 1208 aa, Homo sapiens
MANGGGGGGGSSGGGGGGGGSSLRMSSNIHANHLSLDASSSSSSSSSSSSSSSSSSSSSSVHEPKMDALIIPVTMEVPCDSRGQRMWWAFLASSMVTFFGGLFIILLWRTLKYLWTVCCHCGGKTKEAQKINNGSSQADGTLKPVDEKEEAVAAEVGWMTSVKDWAGVMISAQTLTGRVLVVLVFALSIGALVIYFIDSSNPIESCQNFYKDFTLQIDMAFNVFFLLYFGLRFIAANDKLWFWLEVNSVVDFFTVPPVFVSVYLNRSWLGLRFLRALRLIQFSEILQFLNILKTSNSIKLVNLLSIFISTWLTAAGFIHLVENSGDPWENFQNNQALTYWECVYLLMVTMSTVGYGDVYAKTTLGRLFMVFFILGGLAMFASYVPEIIELIGNRKKYGGSYSAVSGRKHIVVCGHITLESVSNFLKDFLHKDRDDVNVEIVFLHNISPNLELEALFKRHFTQVEFYQGSVLNPHDLARVKIESADACLILANKYCADPDAEDASNIMRVISIKNYHPKIRIITQMLQYHNKAHLLNIPSWNWKEGDDAICLAELKLGFIAQSCLAQGLSTMLANLFSMRSFIKIEEDTWQKYYLEGVSNEMYTEYLSSAFVGLSFPTVCELCFVKLKLLMIAIEYKSANRESRILINPGNHLKIQEGTLGFFIASDAKEVKRAFFYCKACHDDITDPKRIKKCGCKRLIYFEDEQPSTLSPKKKQRNGGMRNSPNTSPKLMRHDPLLIPGNDQIDNMDSNVKKYDSTGMFHWCAPKEIEKVILTRSEAAMTVLSGHVVVCIFGDVSSALIGLRNLVMPLRASNFHYHELKHIVFVGSIEYLKREWETLHNFPKVSILPGTPLSRADLRAVNINLCDMCVILSANQNNIDDTSLQDKECILASLNIKSMQFDDSIGVLQANSQGFTPPGMDRSSPDNSPVHGMLRQPSITTGVNIPIITELAKPGKLPLVSVNQEKNSGTHILMITELVNDTNVQFLDQDDDDDPDTELYLTQPFACGTAFAVSVLDSLMSATYFNDNILTLIRTLVTGGATPELEALIAEENALRGGYSTPQTLANRDRCRVAQLALLDGPFADLGDGGCYGDLFCKALKTYNMLCFGIYRLRDAHLSTPSQCTKRYVITNPPYEFELVPTDLIFCLMQFDHNAGQSRASLSHSSHSSQSSSKKSSSVHSIPSTANRQNRPKSRESRDKQNRKEMVYR

SEQ ID NO: 98099 - protein, 829 aa, Homo sapiens
MNRLWSWVTAKVSRGTGPPPLGMPREARGVSPPGLEDYEEIPRDLTLDALLEMNEAKVKETLRRCGASGDECGRLQYALTCLRKVTGLGGEHKEDSSWSSLDARRESGSGPSTDTLSAASLPWPPGSSQLGRAGNSAQGPRSISVSALPASDSPTPSFSEGLSDTCIPLHASGRLTPRALHSFITPPTTPQLRRHTKLKPPRTPPPPSRKVFQLLPSFPTLTRSKSHESQLGNRIDDVSSMRFDLSHGSPQMVRRDIGLSVTHRFSTKSWLSQVCHVCQKSMIFGVKCKHCRLKCHNKCTKEAPACRISFLPLTRLRRTESVPSDINNPVDRAAEPHFGTLPKALTKKEHPPAMNHLDSSSNPSSTTSSTPSSPAPFPTSSNPSSATTPPNPSPGQRDSRFNFPDISAFAHAAPLPEAADGTRLDDQPKADVLEAHEAEAEEPEAGKSEAEDDEDEVDDLPSSRRPWRGPISRKASQTSVYLQEWDIPFEQVELGEPIGQGRWGRVHRGRWHGEVAIRLLEMDGHNQDHLKLFKKEVMNYRQTRHENVVLFMGACMNPPHLAIITSFCKGRTLHSFVRDPKTSLDINKTRQIAQEIIKGMGYLHAKGIVHKDLKSKNVFYDNGKVVITDFGLFGISGVVREGRRENQLKLSHDWLCYLAPEIVREMTPGKDEDQLPFSKAADVYAFGTVWYELQARDWPLKNQAAEASIWQIGSGEGMKRVLTSVSLGKEVSEILSACWAFDLQERPSFSLLMDMLEKLPKLNRRLSHPGHFWKSADRWRSRYYGKGRYGHPDFKSSCPILEEYINSSKVVPRFERFGLGVLESSNPKM

SEQ ID NO: 98100 - protein, 91 aa, Homo sapiens
PEEYVPTVFDHYAVSVTVGGKQYLLGLYDTAGQALQQSELDFWEEISVSSGSWGHVITFSFHTRAWVSSGQDLLCPLAPASAVLLLDRGRL

SEQ ID NO: 98101 - protein, 356 aa, Homo sapiens
MMMKNCMDIDECERNPLLCRGGTCVNTEGSFQCDCPLGHELSPSREDCVDINECSLSDNLCRNGKCVNMIGTYQCSCNPGYQATPDRQGCTDIDECMIMNGGCDTQCTNSEGSYECSCSEGYALMPDGRSCADIDECENNPDICDGGQCTNIPGEYRCLCYDGFMASMDMKTCIDVNECDLNSNICMFGECENTKGSFICHCQLGYSVKKGTTGCTDVDECEIGAHNCDMHASCLNIPGSFKCSCREGWIGNGIKCIDLDECSNGTHQCSINAQCVNTPGSYRCACSEGFTGDGFTCSDVDECAENINLCENGQCLNVPGAYRCECEMGFTPASDSRSCQGGSPGFQLIFKLDQPQ

SEQ ID NO: 98102 - protein, 146 aa, Homo sapiens
  MOD_RES (1)..(1): Any amino acid
XRPLQVKVVGLFSCPNFQIAKSAAEELKNETWEYSSSVISFVNGQFLGDALDLQKWAHEVWDIVDIKPSALYDALTEDFSAKFLRDTKVLCTGKAGFSQRGIRLHYKNSIFHRIVQNGWIQGGDIVYGKGDNGESIYGPTFEDENF

SEQ ID NO: 98103 - protein, 207 aa, Homo sapiens
SLLDELESSVPSPVPAITVNQGEMSSPQRVTSTQQQTRISASSATRELDELMASLSDFKVVFPPGSPIPLRRTISVLASPSVPLLQHRTDAAASSSSPLPSLLASSPLGPSAYTCGSSGVQSAGEEPHDEGVQGPALPIPAPHTMRSVGCQTDEDPLFPPMQIQGLEQRADGERCWAAGWPRDGGRSSPGGQDEGGFMAQGKTGSSS

SEQ ID NO: 98104 - protein, 83 aa, Homo sapiens
MRRRVHQINGHKFMATYLRQPTYCSHCREFIWGVFGKQGYQCQVCTCVVHKRCHHLIVTACTCQNNINKVDSKIAEQRFGINI

SEQ ID NO: 98105 - protein, 308 aa, Homo sapiens
MATPEENSNPHDRATPQLPAQLQELEHRVARRRLSQARHRATLAALFNNLRKTVYSQSDLIASKWQVLNKAKSHIPELEQTLDNLLKLKASFNLEDGHASSLEEVKKEYASMYSGNDSFPQNGSSPWYLNFYKQTMDLLTGSGIITPQEAALPIVSAAISHLWQNLSEERKASLRQAWAQKHRGPATLAEACREPACAEGSVKDSGVDSQGASCSLVSTPEEILFEDAFDVASFLDKSEVPSTSSSSSVLASCNPENPEEKFQLYMQIINFFKGLSCANTQVKQEASFPVDEEMIMLQCTETFDDEDL

SEQ ID NO: 98106 - protein, 144 aa, Homo sapiens
MDKDSQGLLDSSLMASGTASRSEDEESLAGQKRASSQALGTIPKRRSSSRTLYRFIKRKKFDDELVESSLAKSSTRAKGASGVEPGRCSGSEPSSSEKKKVSKAPSTPVPPSPAPAPGLTKRVKKSKQPLQVTKDLGRWKPADD

SEQ ID NO: 98107 - protein, 58 aa, Homo sapiens
MADWARAQSPGAVEEILDRENKRMADSLASKVTRLKSLALDIDRDAEDQNRYLDGMGA

SEQ ID NO: 98108 - protein, 72 aa, Homo sapiens
MSLPPPPPPPQEEEIPELEIDVDELLDMESDDARAARVKELLVDCYKPTEAFISGLLDKIRGMQKLSTPQKK

SEQ ID NO: 98109 - protein, 136 aa, Homo sapiens
  MOD_RES (1)..(1): Any amino acid
XAIVQGQVRPRATLGWVTSGCPLTVLSLLGRVWTPASGERLGVLRALFFKVIKDYPSNEDLHERLEVFKALTDNGRHITYLEEELADFVLQWMDVGLSSEFLLVLVNLVKFNSCYLDEYIARMVQMICLLCVRTAS

SEQ ID NO: 98110 - protein, 126 aa, Homo sapiens
MSSVAVLTQESFAEHRSGLVPQQIKVATLNSEEESDPPTYKDAFPPLPEKAACLESAQEPAGAWGNKIRPIKASVITQVFHVPLEERKYKDMNQFGEGEQAKICLEIMQRTGAHLELSLAKDQGLS

SEQ ID NO: 98111 - protein, 1188 aa, Homo sapiens
MLFPLQVAAVTSSVRDDPLEHCVSPRTRARSPEICKMADNLDEFIEEQKARLAEDKAELESDPPYMEMKGKLSAKLSENSKILISMAKENIPPNSQQTRGSLGIDYGLSLPLGEDYERKKHKLKEELRQDYRRYLTQERLKLERNKEYNQFLRGKEESSEKFRQVEKSTEPKSQRNKKPIGQVKPDLTSQIQTSCENSEGPRKDVLTPSEAYEELLNQRRLEEDRYRQLDDEIELRNRRIIKKANEEVGISNLKHQRFASKAGIPDRRFHRFNEDRVFDRRYHRPDQDPEVSEEMDERFRYESDFDRRLSRVYTNDSAPDNETSKSANQDTCSPFAGMLFGGEDRELIQRRKEKYRLELLEQMAEQQRNKRREKDLELRVAASGAQDPEKSPDRLKQFSVAPRHFEEMIPPERPRIAFQTPLPPLSAPSVPPIPSVHPVPSQNEDLRSGLSSALGEMVSPRIAPLPPPPLLPPLATNYRTPYDDAYYFYGSRNTFDPSLAYYGSGMMGVQPAAYVSAPVTHQLAQPVVNTVGQNELKITSDQVINSGLIFEDKPKPSKQSLQSYQEALQQQIREREERRKKEREEKEEYEAKLEAEMRTYNPWGKGGGGAPLRDAKGNLITDLNRMHRQNIDAYHNPDARTYEDKRAVVSLDPNLATSNAENLEDAANKSSGHMQTQSSPFARGNVFGEPPTELQIKQQELYKNFLRFQIEEKKQREEAERERLRIAEEKEERRLAEQRARIQQEYEEEQEKKREKEEEQRLKNEEHIRLAEERQKEAERKKKEEEEKYNLQLQHYCERDNLIGEETKHMRQPSPIVPALQNKIASKLQRPPSVDSIIRSFIHESSMSRAQSPPVPARKNQLRAEEEKKNVIMELSEMRKQLRSEERRLQERLLHMDSDDEIPIRKKERNPMDIFDMARHRLQAPVRRQSPKGLDAATFQNVHDFNELKDRDSETRVDLKFMYLDPPRDHHTLEIQQQALLREQQKRLNRIKMQEGAKVDLDAIPSAKVREQRMPRDDTSDFLKNSLLESDSAFIGAYGETYPAIEDDVLPPPSQLPSARERRRNKWKGLDIDSSRPNVAPDGLSLKSISSVNVDELRVRNEERMRRLNEFHNKPINTDDESSLVDPDDIMKHIGDDGSNSVATEPWLRPGTSETLKRFMAEQLNQEQQQIPGKPGTFTWQGLSTAHG

SEQ ID NO: 98112 - protein, 135 aa, Homo sapiens
MVLAPLPDPGPPSLAVAPEPCPQPLRSPSLDNPTPFPNLGPSENPLKRLLVPGEGCAHVPQGLGRNGPGRGCLLPGEYCGPAHFQQPPTLPHLRPVQGLPAGLGGGHGFPGPWGELSPRSSWCASNPPVPHHLNQ

SEQ ID NO: 98113 - protein, 725 aa, Homo sapiens
MLQTKDLIWTLFFLGTAVSLQVDIVPSQGEISVGESKFFLCQVAGDAKDKDISWFSPNGEKLTPNQQRISVVWNDDSSSTLTIYNANIDDAGIYKCVVTGEDGSESEATVNVKIFQKLMFKNAPTPQEFREGEDAVIVCDVVSSLPPTIIWKHKGRDVILKKDVRFIVLSNNYLQIRGIKKTDEGTYRCEGRILARGEINFKDIQVIVNVPPTIQARQNIVNATANLGQSVTLVCDAEGFPEPTMSWTKDGEQIEQEEDDEKYIFSDDSSQLTIKKVDKNDEAEYICIAENKAGEQDATIHLKVFAKPKITYVENQTAMELEEQVTLTCEASGDPIPSITWRTSTRNISSEEKTLDGHMVVRSHARVSSLTLKSIQYTDAGEYICTASNTIGQDSQSMYLEVQYAPKLQGPVAVYTWEGNQVNITCEVFAYPSATISWFRDGQLLPSSNYSNIKIYNTPSASYLEVTPDSENDFGNYNCTAVNRIGQESLEFILVQADTPSSPSIDQVEPYSSTAQVQFDEPEATGGVPILKYKAEWRAVGEEVWHSKWYDAKEASMEGIVTIVGLKPETTYAVRLAALNGKGLGEISAASEFKTQPVREPSAPKLEGQMGEDGNSIKVNLIKQDDGGSPIRHYLVRYRALSSEWKPEIRLPSGSDHVMLKSLDWNAEYEVYVVAENQQGKSKAAHFVFRTSAQPTAIPATLGGNSASYTFVSLLFSAVTLLLLC

SEQ ID NO: 98114 - protein, 106 aa, Homo sapiens
MKVLLRLICFIALLISSLEADKCKEREEKIILVSSANEIDVRPCPLNPNEHKGTITWYKDDSKTPVSTEQASRIHQHKEKLWFVPAKVEDSGHYYCVVRNSSYCLR

SEQ ID NO: 98115 - protein, 156 aa, Homo sapiens
MARQKMSEIFPLTEELWLEWLHDEISMAQDGLDREHVYDLFEKAVKDYICPNIWLEYGQYSVGGIGQKGGLEKVRSVFERALSSVGLHMTKGLALWEAYREFESAIVEAARLEKVHSLFRRQLAIPLYDMEATFAEYEEWSEDPIPESVIQNYNKA

SEQ ID NO: 98116 - protein, 727 aa, Homo sapiens
MGPPSPGDDEEEAAAAAGAPAAAGATGDLASAQLGGAPNRWEVLSATPTTIKDEAGNLVQIPSAATSSGQYVLPLQNLQNQQIFSVAPGSDSSNGTVSSVQYQVIPQIQSADGQQVQIGFTGSSDNGGINQESSQIQIIPGSNQTLLASGTPSANIQNLIPQTGQVQVQGVAIGGSSFPGQTQVVANVPLGLPGNITFVPINSVDLDSLGLSGSSQTMTAGINADGHLINTGQAMDSSDNSERTGERVSPDINETNTDTDLFVPTSSSSQLPVTIDSTGILQQNTNSLTTSSGQVHSSDLQGNYIQSPVSEETQAQNIQVSTAQPVVQHLQLQESQQPTSQAQIVQGITPQTIHGVQASGQNISQQALQNLQLQLNPGTFLIQAQTVTPSGQVTWQTFQVQGVQNLQNLQIQNTAAQQITLTPVQTLTLGQVAAGGAFTSTPVSLSTGQLPNLQTVTVNSIDSAGIQLHPGENADSPAAYTCFNSSNHSKRLDIRIKEEEPDPEEWQLSGDSTLNTNDLTHLRVQVVDEEGDQQHQEGKRLRRVACTCPNCKEGGGRGTNLGKKKQHICHIPGCGKVYGKTSHLRAHLRWHSGERPFVCNWMYCGKRFTRSDELQRHRRTHTGEKKFVCPECSKRFMRSDHLAKHIKTHQNKKGIHSSSTVLASVEAARDDTLITAGGTTLILANIQQGSVSGIGTVNTSATSNQDILTNTEIPLQLVTVSGNETME

SEQ ID NO: 98117 - protein, 290 aa, Homo sapiens
METNCRKLVSACVQLGVQPAAVECLFSKDSEIKKVEFTDSPESRKEAASSKFFPRQHPGANEKDKSQQGKNEDVGAEDPSKKKRQRRQRTHFTSQQLQELEATFQRNRYPDMSTREEIAVWTNLTEARVRVWFKNRRAKWRKRERNQQAELCKNGFGPQFNGLMQPYDDMYPGYSYNNWAAKGLTSASLSTKSFPFFNSMNVNPLSSQSMFSPPNSISSMSMSSSMVPSAVTGVPGSSLNSLNNLNNLSSPSLNSAVPTPACPYAPPTPPYVYRDTCNSSLASLRLKAKQ

SEQ ID NO: 98118 - protein, 269 aa, Homo sapiens
MRLLAWLIFLANWGGARAEPEEAQGPCAQEKGKGPPPTSILASLAPGLEAGKFWHIADLHLDPDYKVSKDPFQVCPSAGSQPVPDAGPWGDYLCDSPWALINSSIYAMKEIEPEPDFILWTGDDTPHVPDEKLGEAAVLEIVERLTKLIREVFPDTKVYAALGNHDFHPKNQFPAGSNNIYNQIAELWKPWLSNESIALFKKGAFYCEKLPGPSGAGRIVVLNTNLYYTSNALTADMADPGQQFQWLEDVLTDASKAGDMVYIVGHVPP

SEQ ID NO: 98119 - protein, 200 aa, Homo sapiens
MAASAAVFSRLRSGLRLGSRGLCTRLATPPRRAPDQETTRWTKMVPRFLMSSTMMIIEPTSPCLLPDPLQEPYYQPPYTLVLELTGVLLHPEWSLATGWRFKKRPGIETLFQQLAPLYEIVIFTSETGMTAFPLIDSVDPHGFISYRLFRDATRYMDGHHVKDISCLNRDPARVVVVDCKKEAFRLQPYNGVALRPWDGN

SEQ ID NO: 98120 - protein, 636 aa, Homo sapiens
MALYQRWRCLRLQGLQACRLHTAVVSTPPRWLAERLGLFEELWAAQVKRLASMAQKEPRTIKISLPGGQKIDAVAWNTTPYQLARQISSTLADTAVAAQVNGEPYDLERPLETDSDLRFLTFDSPEGKAVFWHSSTHVLGAAAEQFLGAVLCRGPSTEYGFYHDFFLGKERTIRGSELPVLERICQELTAAARPFRRLEASRDQLRQLFKDNPFKLHLIEEKVTGPTATVYGCGTLVDLCQGPHLRHTGQIGGLKLLSAEYAHRGFSEVKTPTLFSTKLWEQSGHWEHYQEDMFAVQPPGSDRPPSSQSDDSTRHITDTLALKPMNCPAHCLMFAHRPRSWRELPLRLADFGALHRAEASGGLGGLTRLRCFQQDDAHIFCTTDQLEAEIQSCLDFLRSVYAVLGFSFRLALSTRPSGFLGDPCLWDQAEQVLKQALKEFGEPWDLNSGDGAFYGPKIDVHLHDALGRPHQCGTIQLDFQLPLRFDLQYKGQAGALERPVLIHRAVLGSVERLLGVLAESCGGKWPLWLSPFQVVVIPVGSEQEEYAKEAQQSLRAAGLVSDLDADSGLTLSRRIRRAQLAHYNFQFVVGQKEQSKRTVNIRTRDNRRLGEWDLPEAVQRLVELQNTRVPNAEEIF

SEQ ID NO: 98121 - protein, 105 aa, Homo sapiens
  MOD_RES (1)..(1): Any amino acid
XMKEKQSTKVYLSLIPIISGVLLATVTELSFDMWGLVSALAATLCFSLQNIFSKKVLRDSRIHHLRLLNILGCHAVFFMIPTWVLVDLSAFLVSSDLGLPSENVL

SEQ ID NO: 98122 - protein, 154 aa, Homo sapiens
MPPAQGYEFAAAKGPRDELGPSFPMASPPGLELKTLSNGPQAPRRSAPLGPVAPTREGVENACFSSEEHETHFQNPGNTRLGSSPSPPGGVSSLPRSQRDDLSLHSEEGPALEPVSRPVDYGFVSALVFLVSGILLVVTAYAIPREARVNPDTV

SEQ ID NO: 98123 - protein, 102 aa, Homo sapiens
  MOD_RES (1)..(1): Any amino acid
XSACHLRKATCLLGRSIGLAYEGKCITKSCEDIQCTGGKKCLWDFKVGRGRCSLCDELCPDSKSDEPVCASDNATYASECAMKEAACSSGVLLEVKHSGSCN

SEQ ID NO: 98124 - protein, 54 aa, Homo sapiens
MPAACPAAPSGCLLPSTLLPAPQGPLGTVDPQTGHPWNFTLVSPQTSLKVPPTR

SEQ ID NO: 98125 - protein, 98 aa, Homo sapiens
  MOD_RES (1)..(1): Any amino acid
XSQSFYLEHTDDILCLTVNQHPKYRNVVATSQIGDITETPGTTPSIHIWDAMTKHTLSMLRCFHSKGVNYINFSATGKLLVSVGVDPEHTITVWRWQE

SEQ ID NO: 98126 - protein, 109 aa, Homo sapiens
PGKVRLQERAGLAEGARRGRRDRRGRNILGNKRAGLRRADGEAPSALPYCYFLQKDAEAPWLSKPAYDSAECRHHAAEALRVAWCLEAASLSHRPGPRSGLSVSSLRPK

SEQ ID NO: 98127 - protein, 86 aa, Homo sapiens
MADKEAGGSDGPRETAPTSAYSSPARSLGDTGITPLSPSHIVNDTDSNVSEQQSFLVVVAVDFGTTSSGYAYSFTKEPECIHVMRS

SEQ ID NO: 98128 - protein, 55 aa, Homo sapiens
SPRDEYKPLDLSDSTLSYTETEATNSLITAPGEFSADAGIGSRGNRGLESSVPCS

SEQ ID NO: 98129 - protein, 264 aa, Homo sapiens
MNCMKGPLHLEHRAAGTKLSAVSSSSCHHPQPLAMASVLAPGQPRSLDSSKHRLEVHTISDTSSPEAAEKDKSQQGKNEDVGAEDPSKKKRQRRQRTHFTSQQLQELEATFQRNRYPDMSTREEIAVWTNLTEARVRVGASTESGRDGGRMLWRYRPSRPGENVEGSAAWEGAGGAQLCKGRRPRGGLVARLQFPLRGRQDCRPGSGSQSGTGSLPRHPAISRAGLHGQSPAQDIVFLACSCQSRANKIPTRPRAANRLQPVSL

SEQ ID NO: 98130 - protein, 91 aa, Homo sapiens
MARGERIYRAVKDLFLHEPEQMLWNAFPPSGRELSYTSRSQMPGETISRNLQETRREKKCWERSTERHEVRGTEDQRRQERSPGTFSKPKI

SEQ ID NO: 98131 - protein, 792 aa, Homo sapiens
MADIGGHAIYKVEDTNMIYIPNDSVRVTHPDEARYLRIFQNVDLSSNFYFSYSYDLSHSLQYNLTVLRMPLEMLKSEMTQNRQESFDIFEDEGLITQGGSGVFGICSEPYMKYVWNGELLDIIKSTVHRDWLLYIIHGFCGQSKLLIYGRPVYVTLIARRSSKFAGTRFLKRGANCEGDVANEVETEQILCDASVMSFTAGSYSSYVQVRGSVPLYWSQDISTMMPKPPITLDQADPFAHVAALHFDQMFQRFGSPIIILNLVKEREKRKHERILSEELVAAVTYLNQFLPPEHTIVYIPWDMAKYTKSKLCNVLDRLNVIAESVVKKTGFFVNRPDSYCSILRPDEKWNELGGCVIPTGRLQTGILRTNCVDCLDRTNTAQFMVGKCALAYQLYSLGLIDKPNLQFDTDAVRLFEELYEDHGDTLSLQYGGSQLVHRVKTYRKIAPWTQHSKDIMQTLSRYYSNAFSDADRQDSINLFLGVFHPTEGKPHLWELPTDFYLHHKNTMRLLPTRRSYTYWWTPEVIKHLPLPYDEVICAVNLKKLIVKKFHKYEEEIDIHNEFFRPYELSSFDDTFCLAMTSSARDFMPKTVGIDPSPFTVRKPDETGKSVLGNKSNREEAVLQRKTAASAPPPPSEEAVSSSSEDDSGTDREEEGSVSQRSTPVKMTDAGDSAKVTENVVQPMKELYGINLSDGLSEEDFSIYSRFVQLGQSQHKQDKNSQQPCSRCSDGVIKLTPISAFSQDNIYEVQPPRVDRKSTEIFQAHIQASQGIMQPLGKEDSSMYREYIRNRYL

SEQ ID NO: 98132 - protein, 165 aa, Homo sapiens
MPLFFRKRKPSEEARKRLEYQMCLAKEAGADDILDISKCELSEIPFGAFATCKVLQKKVLIVHTNHLTSLLPKSCSLLSLATIKVLDLHDNQLTALPDDLGQLTALQAGVQWCNLSSPQPLPPGFKQFSCLSLPSSWDYRCVPPCPANFCIFSRDGISLCWPGWS

SEQ ID NO: 98133 - protein, 50 aa, Homo sapiens
MEPPGRSSRFPHGTLSPASGTRWASIVPLPPPTFFLEFPSPLLSPLDSSP

SEQ ID NO: 98134 - protein, 18 aa, Homo sapiens
  MOD_RES (1)..(1): Any amino acid
XYWYFDLWGRGTLVTVSS

SEQ ID NO: 98135 - protein, 261 aa, Homo sapiens
  MOD_RES (1)..(1): Any amino acid
XRVMAPRTLILLLSGALALTETWACSHSMRYFYTAVSRPGRGEPRFIAVGYVDDTQFVRFDSDAASPRGEPRAPWVEQEGPEYWDRETQKYKRQAQTDRVSLRNLRGYYNQSEAGSHTLQWMYGCDLGPDGRLLRGYDQSAYDGKDYIALNEDLRSWTAADTAAQITQRKWEAARAAEQQRAYLEGTCVEWLRRYLENGKETLQRAEHPKTHVTHHLVSDHEASRRWNLPEVGSCGGAFWRRAEIHVPCAARGAAGAPHPE

SEQ ID NO: 98136 - protein, 141 aa, Homo sapiens; identical to SEQ ID NO: 65428
  MOD_RES (1)..(1): Any amino acid

SEQ ID NO: 98137 - protein, 461 aa, Homo sapiens
  MOD_RES (1)..(1): Any amino acid
XLALAFHDGSVHIVHRLSLQTMAVFYSSAAPRPVDEPAMKRPRTAGPAVHLKAMQLSWTSLALVGIDSHGKLSVLRLSPSMGHPLEVGLALRHLLFLLEYCMVTGYDWWDILLHVQPSMVQSLVEKLHEEYTRQTAALQQVLSTRILAMKASLCKLSPCTVTRVCDYHTKLFLIAISSTLKSLLRPHFLNTPDKSPGDRLTEICTKITDVDIDKVMINLKTEEFVLDMNTLQALQQLLQWVGDFVLYLLASLPNQGSLLRPGHSFLRDGTSLGMLRELMVVIRIWGLLKPSCLPVYTATSDTQDSMSLLFRLLTKLWICCRDEGPASEPDEALVDECCLLPSQLLIPSLDWLPASDGLVSRLQPKQPLRLQFGRAPTLPGSAATLQLDGLARAPGQPKIDHLRRLHLGACPTEECKACTRCGCVTMLKSPNRTTAVKQWEQRWIKNCLCGGLWWRVPLSYP

SEQ ID NO: 98138 - protein, 44 aa, Homo sapiens
VFLQHLSPLLSLSTFAALWLTILDFMDKYMHAGSSDLLRRSLSL

SEQ ID NO: 98139 - protein, 165 aa, Homo sapiens
MGCCGCSGGCGSGCGGCGSGCGGCGSGCGGCGSSCCVPICCCKPVCCCVPACSCSSCGSCGGSKGGCGSCGGSKGGCGSCGGSKGGCGSCGCSQCSCCKPCCCSSGCGSSCCQSSCCKPCCCQSSCCKPCCSSSGCGSSCCQSSCCNPCCSQSSCCVPVCCQCKI

SEQ ID NO: 98140 - protein, 47 aa, Homo sapiens
MVLSQRQRDELLEYSGAISAYCNLHLLGSRDSPASASQVAGITEIEL

SEQ ID NO: 98141 - protein, 53 aa, Homo sapiens
  MOD_RES (1)..(1): Any amino acid
XGSPSFLNGSTATSPFAIMPSSPPLAEEGVPGLLYLGSSPSGCLMDSGPTHSQ

SEQ ID NO: 98142 - protein, 92 aa, Homo sapiens
MADNLDEFIEEQKARLAEDKAELESDPPYMEMKGKLSAKLSENSKILISMAKENIPPNSQQTRGSLGSYFVAQAGVQWHNLGSLQPPLSRLK

SEQ ID NO: 98143 - protein, 42 aa, Homo sapiens
MSGRPRTTSFAESCKPVQQPSAFGSMKVSKSRAPDHEKARSL

SEQ ID NO: 98144 - protein, 117 aa, Homo sapiens
  MOD_RES (1)..(1): Any amino acid
XDPEQRPTADELLDRPLLRKRRREMEEKVTLLNAPTKRPRSSTVTEAPIAVVTSRTSEVYVWGGGKSTPQKLDVIKSGCSARQVCAGNTHFAVVTVEKELYTWVLFFSTVFLHMKFH

SEQ ID NO: 98145 - protein, 227 aa, Homo sapiens
MDPKQTTLLCLGDFPMPFISAKSSPVIPLDGSVKIQCQAIREAYLTQLMIIKNSTYREIGRRLKFWNETDPEFVIDHMDANKAGRYQCQYRIGHYRFRYSNTLELVVTGLYGKPFLSADRGLVLMPGENISLTCSSAHIPFDRFSLAKEGELSLPQHQSGEHPANFSLGPVDLNVSGIYRCYGWYNRSPYLWSFPSNALELVVTGRYRPVQPCVWVGCPGPCHRAGI

SEQ ID NO: 98146 - protein, 218 aa, Homo sapiens
DTNKRKRDEGIQESPVPNGHSLPGRDFLRKQMRGDLFTQQQLEVLDRVFERQHYSDIFTTTEPIKPEQWCPVLMRQYLVQPQAVLFQTTEYSAMASLAGGLDDMKANLASPTPADIGSSVPGPQSYPIVTGRDLASTTLPGYPPHVPPAGQGSYSAPTLTGMVPGSEFSGSPYSHPQYSSYNDSWRFPNPGLLGSPYYYSAAARGAAPPAAATAYDRH

SEQ ID NO: 98147 - protein, 201 aa, Homo sapiens
MCARNISQDILILQMHSAHWHINGKYEEKSNLMFWAKEIKIKLGILLQKPDSVGDLVIPYNEKPEKPAKTQKTSLDEALQWRDSLDKLLQNNYGLASFKSFLKSEFSEENLEFWIACEDYKKIKSPAKMAEKAKQIYEEFIQTEAPKEVNIDHFTKDITMKNLVEPSLSSFDMAQKRIHALMEKDSLPRFVRSEFYQELIK

SEQ ID NO: 98148 - protein, 1285 aa, Homo sapiens
MEDGKPVWAPHPTDGFQMGNIVDIGPDSLTIEPLNQKGKTFLALINQVFPAEEDSKKDVEDNCSLMYLNEATLLHNIKVRYSKDRIYTYVANILIAVNPYFDIPKIYSSEAIKSYQGKSLGTRPPHVFAIADKAFRDMKVLKMSQSIIVSGESGAGKTENTKFVLRYLTESYGTGQDIDDRIVEANPLLEAFGNAKTVRNNNSSRFGKFVEIHFNEKSSVVGGFVSHYLLEKSRICVQGKEERNYHIFYRLCAGASEDIREKLHLSSPDNFRYLNRGCTRYFANKETDKQILQNRKSPEYLKAGSMKDPLLDDHGDFIRMCTAMKKIGLDDEEKLDLFRVVAGVLHLGNIDFEEAGSTSGGCNLKNKSAQSLEYCAELLGLDQDDLRVSLTTRVMLTTAGGTKGTVIKVPLKVEQANNARDALAKTVYSHLFDHVVNRVNQCFPFETSSYFIGVLDIAGFEYFEHNSFEQFCINYCNEKLQQFFNERILKEEQELYQKEGLGVNEVHYVDNQDCIDLIEAKLVGILDILDEENRLPQPSDQHFTSAVHQKHKDHFRLTIPRKSKLAVHRNIRDDEGFIIRHFAGAVCYETTQFVEKNNDALHMSLESLICESRDKFIRELFESSTNNNKDTKQKAGKLSFISVGNKFKTQLNLLLDKLRSTGASFIRCIKPNLKMTSHHFEGAQILSQLQCSGMVSVLDLMQGGYPSRASFHELYNMYKKYMPDKLARLDPRLFCKALFKALGLNENDYKFGLTKVFFRPGKFAEFDQIMKSDPDHLAELVKRVNHWLTCSRWKKVQWCSLSVIKLKNKIKYRAEACIKMQKTIRMWLCKRRHKPRIDGLVKVGTLKKRLDKFNEVVSVLKDGKPEMNKQIKNLEISIDTLMAKIKSTMMTQEQIQKEYDALVKSSEELLSALQKKKQQEEEAERLRRIQEEMEKERKRREEDEKRRRKEEEERRMKLEMEAKRKQEEEERKKREDDEKRIQAEVEAQLARQKEEESQQQAVLEQERRDRELALRIAQSEAELISDEAQADLALRSLDSYPVTSKNDGTRPKMTPEQMAKEMSEFLSRGPAVLATKAAAGTKKYDLSKWKYAELRDTINTSCDIELLAACREEFHRRLKVYHAWKSKNKKRNTETEQRAPKSVTDYAQQNPAAQIPARQREIEMNRQQRFFRIPFIRPADQYKDPQSKKKGWWYAHFDGPWIARQMELHPDKPPILLVAGKDDMEMCELNLEETGLTRKRGAEILPRQFEEIWERCGGIQYLQNAIESRQARPTYATAMLQSLLK

SEQ ID NO: 98149 - protein, 135 aa, Homo sapiens [sequence omitted]

SEQ ID NO: 98150 - protein, 38 aa, Homo sapiens
MAAAARARVAYLLRQLQRAACQCPTHSHTYSQDGCFKY

SEQ ID NO: 98151 - protein, 62 aa, Homo sapiens
MGPLTFRDVAIEFSLKEWQCLDTAQRNLYRNVMLENYRNLVFLARPDHLSGARERGLEYEET

SEQ ID NO: 98152 - protein, 97 aa, Homo sapiens
MNQENPPPYPGPGPTAPYPPYPPQPMGPGPMGGPYPPPQGYPYQGYPQYGWQGGPQEPPKTTVYVIERERKMDSGCQAVLAACWAALCCCCLLDNLN

SEQ ID NO: 98153 - protein, 198 aa, Homo sapiens
MGLQQQTGTQQLEPHPPQPEPQPPLDPPQEPQPPLEPPQEPQPPLDPPQEHSPPCSLHRSHSPPWSPQKSHSPLCHSWSRNRLAHGSTRACSSRRAHSSWSQNLHSQSHSPHSRSHSPHSRSHSPHSWSHSLRSSRNSPWFWWIEGGAGRGAGEREVQVWSSLSLDPLYPCPGSCVRLGTHFLVPVCAIFRAPFSCFL

SEQ ID NO: 98154 - protein, 1781 aa, Homo sapiens
MRFYFQDKAAGNFATKCIRVSSTATTQDVIETLAEKFRPDMRMLSSPKYSLYEVHVSGEERRLDIDEKPLVVQLNWNKDDREGRFVLKNENDAIPPKKAQSNGPEKQEKEGVIQNFKRTLSKKEKKEKKKREKEALRQASDKDDRPFQGEDVENSRLAAEVYKDMPETSFTRTISNPEVVMKRRRQQKLEKRMQEFRSSDGRPDSGGTLRIYADSLKPNIPYKTILLSTTDPADFAVAEALEKYGLEKENPKDYCIARVMLPPGAQHSDEKGAKEIILDDDECPLQIFREWPSDKGILVFQLKRRPPDHIPKKTKKHLEGKTPKGKERADGSGYGSTLPPEKLPYLVELSPGRRNHFAYYNYHTYEDGSDSRDKPKLYRLQLSVTEVGTEKLDDNSIQLFGPGIQPHHCDLTNMDGVVTVTPRSMDAETYVEGQRISETTMLQSGMKVQFGASHVFKFVDPSQDHALAKRSVDGGLMVKGPRHKPGIVQETTFDLGGDIHSGTALPTSKSTTRLDSDRVSSASSTAERGMVKPMIRVEQQPDYRRQESRTQDASGPELILPASIEFRESSEDSFLSAIINYTNSSTVHFKLSPTYVLYMACRYVLSNQYRPDISPTERTHKVIAVVNKMVSMMEGVIQKQKNIAGALAFWMANASELLNFIKQDRDLSRITLDAQDVLAHLVQMAFKYLVHCLQSELNNYMPAFLDDPEENSLQRPKIDDVLHTLTGAMSLLRRCRVNAALTIQLFSQLFHFINMWLFNRLVTDPDSGLCSHYWGAIIRQQLGHIEAWAEKQGLELAADCHLSRIVQATTLLTMDKYAPDDIPNINSTCFKLNSLQLQALLQNYHCAPDEPFIPTDLIENVVTVAENTADELARSDGREVQLEEDPDLQLPFLLPEDGYSCDVVRNIPNGLQEFLDPLCQRGFCRLIPHTRSPGTWTIYFEGADYESHLLRENTELAQPLRKEPEIITVTLKKQNGMGLSIVAAKGAGQDKLGIYVKSVVKGGAADVDGRLAAGDQLLSVDGRSLVGLSQERAAELMTRTSSVVTLEVAKQGAIYHGLATLLNQPSPMMQRISDRRGSGKPRPKSEGFELYNNSTQNGSPESPQLPWAEYSEPKKLPGDDRLMKNRADHRSSPNVANQPPSPGGKSAYASGTTAKITSVSTGNLCTEEQTPPPRPEAYPIPTQTYTREYFTFPASKSQDRMAPPQNQWPNYEEKPHMHTDSNHSSIAIQRVTRSQEELREDKAYQLERHRIEAAMDRKSDSDMWINQSSSLDSSTSSQEHLNHSSKSVTPASTLTKSGPGRWKTPAAIPATPVAVSQPIRTDLPPPPPPPPVHYAGDFDGMSMDLPLPPPPSANQIGLPSAQVAAAERRKREEHQRWYEKEKARLEEERERKRREQERKLGQMRTQSLNPAPFSPLTAQQMKPEKPSTLQRPQETVIRELQPQQQPRTIERRDLQYITVSKEELSSGDSLSPDPWKRDAKEKLEKQQQMHIVDMLSKEIQELQSKPDRSAEESDRLRKLMLEWQFQKRLQESKQKDEDDEEEEDDDVDTMLIMQRLEAERRARDEERRRQQQLEEMRKREAEDRARQEEERRRQEEERTKRDAEEKRRQEEGYYSRLEAERRRQHDEAARRLLEPEAPGLCRPPLPRDYEPPSPSPAPGAPPPPPQRNASYLKTQVLSPDSLFTAKFVAYNEEEEEEDCSLAGPNSYPGSTGAAVGAHDACRDAKEKRSKSQDADSPGSSGAPENLTFKERQRLFSQGQDVSNKVKASRKLTELENELNTK

SEQ ID NO: 98155 - protein, 118 aa, Homo sapiens
MFQDPVAFKDVAVNFTQEEWALLDISQKNLYREVMLETFWNLTSIGKKWKDQNIEYEYQNPRRNFRSVTEEKVNEIKEDSHCGETFTPVPDDRLNFQKKKASPEVKSCDSFVCEVGLG

SEQ ID NO: 98156 - protein, 91 aa, Homo sapiens
  MOD_RES (1)..(1): Any amino acid
XDIWRGDVLAKIVPMEQSYPMVLLGNKIDLADRKVPQEVAQGWCREKDIPYFEVSAKNDINVVQAFEMLASRALSRPSLSRERKSREVSLS

SEQ ID NO: 98157 - protein, 79 aa, Homo sapiens
MEESDRPCEISEIDDNPKISENPRRSPTHEKNTMGAQEAHIYVKTVAGSEEPVHDRYRPTIEMERRRGLWWLVPRLSLE

SEQ ID NO: 98158 - protein, 405 aa, Homo sapiens
  MOD_RES (1)..(1): Any amino acid
XGCFCLDFSHNGRILAAACASRDGYPIILYEIPSGRFMRELCGHLNIIYDLSWSKDDHYILTSSSDGTARIWKNEINNTNTFRVLPHPSFVYTAKFHPAVRELVVTGCYDSMIRIWKVEMREDSAILVRQFDVHKSFINSLCFDTEGHHMYSGDCTGVIVVWNTYVKINDLEHSVHHWTINKEIKETEFKGIPISYLEIHPNGKRLLIHTKDSTLRIMDLRILVARKFVGAANYREKIHSTLTPCGTFLFAGSEDGIVYVWNPETGEQVAMYSDLPFKSPIRDISYHPFENMVAFCAFGQNEPILLYIYDFHVAQQEAEMFKRYNGTFPLPGIHQSQDALCTCPKLPHQGSFQIDEFVHTESSSTKMQLVKQRLETVTLESHSVAQAGVQWRNLGSLQPPPPRFK

SEQ ID NO: 98159 - protein, 61 aa, Homo sapiens
  MOD_RES (1)..(1): Any amino acid
XSGSEHCYDIYRLYHSCADPTGCGTGPDARAWDYQISEPPATSSSPTGTWTPGQGAGFGGT

SEQ ID NO: 98160 - protein, 44 aa, Homo sapiens
MSKSKVDNQFYSVEVGDSTFTVLKRYQNLKPIGSGAQGIVCAAY

SEQ ID NO: 98161 - protein, 134 aa, Homo sapiens
MSWKKALRIPGGLRAATVTLMLSMLSTPVAEGRDSPVEPTVTISPSRTEALNHHNLLVCSVTDFYPAQIKVRWFRNGQEETAGVVSTPLIRNGDWTFQILVMLEMTPQRGDVYTCHVEHPSLQSPITVEWRLLH

SEQ ID NO: 98162 - protein, 113 aa, Homo sapiens
  MOD_RES (1)..(1): Any amino acid
XDAYFLQDLSLELLFPESFGFITYQGSLSTPPCSETVTWILIDRALNITSLQMHSLRLLSQNPPSQIFQSLSGNSRPLQPLAHRALRGNRDPRHPERRCRGPNYRLHAQCFST

SEQ ID NO: 98163 - protein, 327 aa, Homo sapiens
MSEAGEEQPMETTGATENGHEAVPEGESPAGAGTGAAAGAGGATAAPPSGNQNGAEGDQINASKNEEDAGKMFVGGLSWDTSKKDLKDYFTKFGEVVDCTIKMDPNTGRSRGFGFILFKDAASVEKVLDQKEHRLDGRVIDPKKAMAMKKDPVKKIFVGGLNPEATEEKIREYFGEFGEIEAIELPMDPKLNKRRGFVFITFKEEEPVKKVLEKKFHTVSGSKCEIKVAQPKEVYQQQQYGSGGRGNRNRGNRGSGGGQSQSWNQGYGNYWNQGYGYQQGYGPGYGGYDYSPYGYYGYGPGYDYSQGSTNYGKSQRRGGHQNNYKPY

SEQ ID NO: 98164 - protein, 383 aa, Homo sapiens
  MOD_RES (1)..(1): Any amino acid
XSRFSGEGKNWSSLINLHCQLELEVHYYNEMFGVWEPLLEPLEIDQTEDFRPWNLGIKMKKKAKMAIVESDPEEENYKVPEYKTVISFHSKDQLNITLSKCGLVMLNNLVKAFTEAATGSSADFVKDLAPFMILNSLGLTISVSPSDSFSVLNIPMAKSYVLKNGESLSMDYIRTKDNDHFNAMTSLSSKLFFILLTPVNHSTADKIPLTKVGRRLYTVRHRESGVERSIVCQIDTVEGSKKVTIRSPVQIRNHFSVPLSVYEGDTLLGTASPENEFNIPLGSYRSFIFLKPEDENYQMCEGIDFEEIIKNDGALLKKKCRSKNPSKESFLINIVPEKDNLTSLSVYSEDGWDLPYIMHLWPPILLRNLLPYKIAYYIEVSAN

SEQ ID NO: 98165 - protein, 173 aa, Homo sapiens
MALTVDVAGPAPWGFRITGGRDFHTPIMVTKVAERGKAKDADLRPGDIIVAINGESAEGMLHAEAQSKIRQSPSPLRLQLDRSQATSPGQTNGDSSLEVLATRFQGSVRTYTESQSSLRSSYSSPTSLSPRAGSPFSPPPSSSSLTGEAAISRSFQSLACSPGLPAADRLSYS

SEQ ID NO: 98166 - protein, 36 aa, Homo sapiens
  MOD_RES (1)..(1): Any amino acid
XEHYKKLAEEQQKQYKVHLDLWVKRWAGWSRTPDLM

SEQ ID NO: 98167 - protein, 476 aa, Homo sapiens
MLEASQDMGRTLEWRPRTPALVRGCHLEGVAGHKEAHILRVLPGHSAGPRTVTVKVELSCAPGDLDAVLILQGPPYVSWLIDANHNMQIWTTGEYSFKIFPEKNIRGFKLPDTPQGLLGEARMLNASIVASFVELPLASIVSLHASSCGGRLQTSPAPIQTTPPKDTCSPELLMSLIQTKCADDAMTLVLKKELVAHLKCTITGLTFWDPSCEAEDRGDKFVLRSAYSSCGMQVSASMISNEAVVNILSSSSPQRKKVHCLNMDSLSFQLGLYLSPHFLQASNTIEPGQQSFVQVRVSPSVSEFLLQLDSCHLDLGPEGGTVELIQGRAAKGNCVSLLSPSPEGDPRFSFLLHFYTVPIPKTGTLSCTVALRPKTGSQDQEVHRTVFMRLNIISPDLSGCTSKGLVLPAVLGITFGAFLIGALLTAALWYIYSHTRSPSKREPVVAVAAPASSESSSTNHSIGSTQSTPCSTSSMA

SEQ ID NO: 98168 - protein, 194 aa, Homo sapiens
MAPQLWELHLLSGPEHFSEAHVFLSLCLSACFADGILPLDLDASELLSDTFEVLSSKEIKLLAMRSKPDKDLLMEEDDMALANVVMQEAQKKLISQVQKRNFIENIIPIIISLKTVLEKNKIPALRELMHYLREVMQDYRDELKDFFAVDKQLASELEYDMKKYQEQLVQEQELAKHADVAGTAGGAEVAPVAQ

SEQ ID NO: 98169 - protein, 48 aa, Homo sapiens
MAMNYNAKDEVDGGPPCAPGGTAKTRRPDNTAFKQQRLPAWQPILTAD

SEQ ID NO: 98170 - protein, 937 aa, Homo sapiens
  MOD_RES (1)..(1): Any amino acid
XVYEADLAENSAPGTPILQLRAADLDVGVNGQIEYVFGAATESVRRLLRLDETSGWLSVLHRIDREEVNQLRFTVMARDRGQPPKTDKATVVLNIKDENDNVPSIEIRKIGRIPLKDGVANVAEDVLVDTPIALVQVSDRDQGENGVVTCTVVGDVPFQLKPASDTEGDQNKKKYFLHTSTPLDYEATREFNVVIVAVDSGSPSLSSNNSLIVKVGDTNDNPPMFGQSVVEVYFPENNIPGERVATVLATDADSGKNAEIAYSLDSSVMGIFAIDPDSGDILVNTVLDREQTDRYEFKVNAKDKGIPVLQGSTTVIVQVADKNDNDPKFMQDVFTFYVKENLQPNSPVGMVTVMDADKGRNAEMSLYIEENNNIFSIENDTGTIYSTMSFDREHQTTYTFRVKAVDGGDPPRSATATVSLFVMDENDNAPTVTLPKNISYTLLPPSSNVRTVVATVLATDSDDGINADLNYSIVGGNPFKLFEIDPTSGVVSLVGKLTQKHYGLHRLVVQVNDSGQPSQSTTTLVHVFVNESVSNATAIDSQIARSLHIPLTQDIAGDPSYEISKQRLSIVIGVVAGIMTVILIILIVVMARYCRSKNKNGYEAGKKDHEDFFTPQQHDKSKKPKKDKKNKKSKQPLYSSIVTVEASKPNGQRYDSVNEKLSDSPSMGRYRSVNGGPGSPDLARHYKSSSPLPTVQLHPQSPTAGKKHQAVQDLPPANTFVGAGDNISIGSDHCSEYSCQTNNKYSKQPFRRVTFSVVSQPQDPHQGSLQSCYDSGLEESETPSSKSSSGPRLGALPLPEDNYERTTPDGSVDSRPLPDVALTGKCTRECDEYGHSDSCWMPVRTSPERKKSQPKLSTFMPVDERGSQEKLANGEAAIMGDRNRNLLNKKLTSSYETFSAASFSKNEEANPEDIPLTKTGEYKPSPVNTLTRREVYL

SEQ ID NO: 98171 - protein, 143 aa, Homo sapiens
  MOD_RES (1)..(1): Any amino acid
XTSKCSSRRWCPVPASSSCVSHLLGSGGLTEQELMEQLEHCELAPPAPSAPSWGCLPSPSPRISLTSLHSASSNTSLSGHRGSPSPPQAEARRRGGGSFVERCQELVRSGPDLRRPPTPAPWPSSGLGTPLTPPKMKLNETSF

SEQ ID NO: 98172 - protein, 105 aa, Homo sapiens
  MOD_RES (1)..(1): Any amino acid
XLELTSENLSRALKTAQNARALKIKLTNKHFPCLTVSVELLSMSSSSRIVTHDIPIKVIPRKLWKDLQEPVVPDPDVSIYLPVLKTMKSVVEKMKNISNHLVPSN

SEQ ID NO: 98173 - protein, 49 aa, Homo sapiens
MEEEKGYSRPWTPRPVLCSGPPAQPPRLPVRAADRGAGLQLRAHPCPAR

SEQ ID NO: 98174 - protein, 403 aa, Homo sapiens
MPRVKAAQAGRQSSAKRHLAEQFAVGEIITDMAKKEWKVGLPIGQGGFGCIYLADMNSSESVGSDAPCVVKVEPSDNGPLFTELKFYQRAAKPEQIQKWIRTRKLKYLGVPKYWGSGLHDKNGKSYRFMIMDRFGSDLQKIYEANAKRFSRKTVLQLSLRILDILEYIHEHEYVHGDIKASNLLLNYKNPDQVYLVDYGLAYRYCPEGVHKEYKEDPKRCHDGTIEFTSIDAHNGVAPSRRGDLEILGYCMIQWLTGHLPWEDNLKDPKYVRDSKIRYRENIASLMDKCFPEKNKPGEIAKYMETVKLLDYTEKPLYENLRDILLQGLKAIGSKDDGKLDLSVVENGGLKAKTITKKRKKEIEESKEPGVEDTEWSNTQTEEAIQTLSLIFLQGSRTRKRVQK

SEQ ID NO: 98175 - protein, 160 aa, Homo sapiens [sequence omitted]

SEQ ID NO: 98176 - protein, 148 aa, Homo sapiens
MALRGVSVRLLSRGPGLHVLRTWVSSAAQTEKGGRTQSQLAKSSRPEFDWQDPLVLEEQLTTDEILIRDTFRTYCQERLMPRILLANRNEGYGCAGVSSVAYGLLARELERVDSGYRSAMSVQSSLVMHPIYAYGSEEQRQKYLPQLA

SEQ ID NO: 98177 - protein, 746 aa, Homo sapiens
MAAADGSLFDNPRTFSRRPPAQASRQAKATKRKYQASSEAPPAKRRNETSFLPAKKTSVKETQRTFKGNAQKMFSPKKHSVSTSDRNQEERQCIKTSSLFKNNPDIPELHRPVVKQVQEKVFTSAAFHELGLHPHLISTINTVLKMSSMTSVQKQSIPVLLEGRDALVRSQTGSGKTLAYCIPVVQSLQAMESKIQRSDGPYALVLVPTRELALQSFDTVQKLLKPFTWIVPGVLMGGEKRKSEKARLRKGINILISTPGRLVDHIKSTKNIHFSRLRWLVFDEADRILDLGFEKDITVILNAVNAECQKRQNVLLSATLTEGVTRLADISLHDPVSISVLDKSHDQLNPKDKAVQEVCPPPAGDKLDSFAIPESLKQHVTVVPSKLRLVCLAAFILQKCKFEEDQKMVVFFSSCELVEFHYSLFLQTLLSSSGAPASGQLPSASMRLKFLRLHGGMEQEERTAVFQEFSHSRRGVLLCTDVAARGLDLPQVTWIVQYNAPSSPAEYIHRIGRTARIGCHGSSLLILAPSEAEYVNSLASHKINVSEIKMEDILCVLTRDDCFKGKRWGAQKSHAVGPQEIRERATVLQTVFEDYVHSSERRVSWAKKALQSFIQAYATYPRELKHIFHVRSLHLGHVAKSFGLRDAPRNLSALTRKKRKAHVKRPDLHKKTQSKHSLAEILRSEYSSGMEADIAKVKKQNAPGEPGGRPLQHSLQPTPCFGRGKTLKWRKTQKGVQRDSKTSQKV

SEQ ID NO: 98178 - protein, 228 aa, Homo sapiens
MAAEEEEVDSADTGERSGWLTGWLPTWCPTSISHLKEAEEKMLKCVPCTYKKEPVRISNGNKIWTLKFSHNISNKTPLVLLHGFGGGLGLWALNFGDLCTNRPVYAFDLLGFGRSSRPRFDSDAEEVENQFVESIEEWRCALGLDKMILLGHNLGGFLAAAYSLKYPSRVNHLILVEPWGFPERPDLADQDRPIPVWIRALGAALTPFNPLAGLRIAGPFVVRQLSRI

SEQ ID NO: 98179 - protein, 277 aa, Homo sapiens
FNIADGGFTELHTLWQNEERAAISSGKLNEIWHRRHDYWLLAGIVLHGYARWQDIQNDAQFAIINEPFKTEANKGNFLEMKNKFLARRFKLLEQALVIEEQLRRAAYLNLSQEPAHPAMALHARFAEAECLAESHQHLSKESLAGNKPANAVLHKGLPAGSLRYTSGVRGGLQRRTRRGPGRRRRQLQPDACRVLHHSRHQRPSSACEEGEGNGGGIGVRRAGSEGAPSRGGDLYRRLTGSQACPSPRPRPRGRPPAQALGPAASPPPSPPLGPSLG

SEQ ID NO: 98180 - protein, 398 aa, Homo sapiens
MAAVQMDPELAKRLFFEGATVVILNMPKGTEFGIDYNSWEVGPKFRGVKMIPPGIHFLHYSSVDKANPKEVGPRMGFFLSLHQRGLTVLRWSTLREEVDLSPAPESEVEAMRANLQELDQFLGPYPYATLKKWISLTNFISEATVEKLQPENRQICAFSDVLPVLSMKHTKDRVGQNLPRCGIECKSYQEGLARLPEMKPRAGTEIRFSELPTQMFPEGATPAEITKHSMDLSYALETVLNKQFPSSPQDVLGELQFAFVCFLLGNVYEAFEHWKRLLNLLCRSEAAMMKHHTLYINLISILYHQLGEIPADFFVDIVSQDNFLTSTLQRQSLAVSPRLKCSDLIIARCSLELLGSYDPPTSASRVAGTTGRYHHTRLINNNKKNCRDKVFLCCPGWS

SEQ ID NO: 98181 - protein, 21 aa, Homo sapiens
  MOD_RES (1)..(1): Any amino acid
XRRDLSSADPAVLGATMEIRL

SEQ ID NO: 98182 - protein, 292 aa, Homo sapiens
MSSTLPALLCVETLPKPFIWAEPHFMVPKEKQVTICCQGNYGAVEYQLHFEGSLFAVDRPKPPERINKVKFYIPDMNSRMAGQYSCIYRVGELWSEPSNLLDLVVTEMYDTPTLSVHPGPEVISGEKVTFYCRLDTATSMFLLLKEGRSSHVQRGYGKVQAEFPLGPVTTAHRGTYRCFGSYNNHAWSFPSEPVKLLVTGDIENTSLAPEDPTFPADTWGTYLLTTETGLQKDHALWDHTAQNLLRMGLAFLVLVALVWFLVEDWLSRKRTRERASRASTWEGRRRLNTQTL

SEQ ID NO: 98183 - protein, 60 aa, Homo sapiens
MELFQAKDHYILQQGERALWCSRRDGGLQLRPATDLLLAWNPICLGLVEGVIGKIQLHSG

SEQ ID NO: 98184 - protein, 82 aa, Homo sapiens
MGGLSTVGACPGILGAQQAQAQSNLLGKCRRPRTAFTSQQLLELEHQFKLNKYLSRPKRFEVATSLMLTETQVKIWFQNRRM

SEQ ID NO: 98185 - protein, 233 aa, Homo sapiens
VTLAGMLEMGVSYLPVNQNWERYLAEAQGTYEELQREMKKSLMDLANDACQLLSGERYKEDPWLWDLEWDLQEFKQKKAKKVKKEPATASKLPIEGAGAPGDPMDQEDLGPCSEEEEFQQDVMARACLQKLKGTTELLPKRPQHLPGHPGWYRKLCPRLDDPAWTPGPSLLSLQMRVTPKLMALTWDGFPLHYSERHGWGYLVPGRRDNLAKLPTEPSSPCTGSTVSNRGSSS

SEQ ID NO: 98186 - protein, 39 aa, Homo sapiens
MAGNKGRGRAAYTFNIEAVGFSKGEKLPDVVLKPPPLFP

SEQ ID NO: 98187 - protein, 148 aa, Homo sapiens
MGCDRNCGLIAGAVIGAVLAVFGGILMPVGDLLIQKTIKKQVVLEEGTIAFKNWVKTGTEVYRQFWIFDVQNPQEVMMNSSNIQVKQRGPYTYRVRFLAKENVTQDAEDNTVSFLQPNGAIFEPSLSVGTEADNFTVLNLAVAAASHI

SEQ ID NO: 98188 - protein, 63 aa, Homo sapiens
MAFGKSHRDPYATSVGHLIEKATFAGVQTEDWGQFMHICDIINTTQDGLLTCVCRTVVQVSSL

SEQ ID NO: 98189 - protein, 581 aa, Homo sapiens
MARRPRHSIYSSDEDDEDFEMCDHDYDGLLPKSGKRHLGKTRWTREEDEKLKKLVEQNGTDDWKVIANYLPNRTDVQCQHRWQKVLNPELIKGPWTKEEDQRVIELVQKYGPKRWSVIAKHLKGRIGKQCRERWHNHLNPEVKKTSWTEEEDRIIYQAHKRLGNRWAEIAKLLPGRTDNAIKNHWNSTMRRKVEQEGYLQESSKASQPAVATSFQKNSHLMGFAQAPPTAQLPATGQPTVNNDYSYYHISEAQNVSSHVPYPVALHVNIVNVPQPAAAAIQRHYNDEDPEKEKRIKELELLLMSTENELKGQQVLPTQNHTCSYPGWHSTTIADHTRPHGDSAPVSCLGEHHSTPSLPADPGSLPEESASPARCMIVHQGTILDNVKNLLEFAETLQFIDSFLNTSSNHENSDLEMPSLTSTPLIGHKLTVTTPFHRDQTVKTQKENTVFRTPAIKRSILESSPRTPTPFKHALAAQEIKYGPLKMLPQTPSHLVEDLQDVIKQESDESGIVAEFQENGPPLLKKIKQEVNTQPFGSNKLRILPPLFLVCSLMCLPLALCNTTTFRARFSYKVQRKGGISN

SEQ ID NO: 98190 - protein, 65 aa, Homo sapiens
MTHEVLSTFIPSEGSSSKVEEVDLQDFKLDVQHVIEVDEGNTAVIACHLPESHPKAQVRYSVKQE

SEQ ID NO: 98191 - protein, 123 aa, Homo sapiens
  MOD_RES (1)..(1): Any amino acid
XPLTSTYLKQMKLRVMNSQEQDETSVSSEDFDMSDSTWMSADPHLASSLSPSQDERMRSPQNLHSQEDGPHRLSHLSQGLNIICSLDTSLRARNPRVSAERNDFSFRGRSRCVTSNSLAKDGY

SEQ ID NO: 98192 - protein, 870 aa, Homo sapiens
MLLFFTLGLLIHFVFFASIFDIYFTSPLVHGMTPQFTPLPPPARRLVLFVADGLRADALYELDENGNSRAPFIRNIIMHEGSWGISHTRVPTESRPGHVALIAGFYEDVSAVAKGWKENPVEFDSLFNESKYTWSWGSPDILPMFAKGASGDHVYTYSYDAKREDFGAQDATKLDTWVFDNVKDFFHHARNNQSLFSKINEEKIVFFLHLLGIDTNGHAHRPSSRDYKHNIKKVDDGVKEIVSMFNHFYGNDGKTTFIFTSDHGMTDWGSHGAGHPSETLTPLVTWGAGIKYPQRVSAQQFDDAFLKEWRLENWKRLDVNQADIAPLMTSLIGVPFPLNSVGILPVDYLNNTDLFKAESMFTNAVQILEQFKVKMTQKKEVTLPFLFTPFKLLSDSKQFNILRKARSYIKHRKFDEVKPSHLLPCSFVAIGILVAFFLLIQACPWTYYVYGLLPLPIWYAVLREFQVIQDLVVSVLTYPLSHFVGYLLAFTLGIEVLVLSFFYRYMLTAGLTAFAAWPFLTRLWTRAKMTSLSWTFFSLLLAVFPLMPVVGRKPDISLVMGAGLLVLLLSLCVVTSLMKRKDSFIKEELLVHLLQVLSTVLSMYVVYSTQSSLLRKQGLPLMNQIISWATLASSLVVPLLSSPVLFQRLFSILLSLMSTYLLLSTGYEALFPLVLSCLMFVWINIEQETLQQSGVCCKQKLTSIQFSYNTDITQFRQLYLDDIRRAFFLVFFLVTAFFGTGNIASINSFDLASVYCFLTVFSPFMMGALMMWKILIPFVLVMCAFEAVQLTTQLSSKSLFLIVLVISDIMALHFFFLVKDYGSWLDIGTSISHYVIVMSMTIFLVFLNGLAQLLTTKKLRLCGKPKSHFM

SEQ ID NO: 98193 - protein, 645 aa, Homo sapiens
  MOD_RES (1)..(1): Any amino acid
XQCPEGYTCVKIGRNPDYGYTSFDTFSWAFLALFRLMTQDYWENLYQQTLRAAGKTYMIFFVVVIFLGSFYLINLILAVVAMAYEEQNQANIEEAKQKELEFQQMLDRLKKEQEEAEAIAAAAAEYTSIRRSRIMGLSESSSETSKLSSKSAKERRNRRKKKNQKKLSSGEEKGDAEKLSKSESEDSIRRKSFHLGVEGHRRAHEKRLSTPNQSPLSIRGSLFSARRSSRTSLFSFKGRGRDIGSETEFADDEHSIFGDNESRRGSLFVPHRPQERRSSNISQASRSPPMLPVNGKMHSAVDCNGVVSLVDGRSALMLPNGQLLPEGTTNQIHKKRRCSSYLLSEDMLNDPNLRQRAMSRASILTNTVEELEESRQKCPPWWYRFAHKFLIWNCSPYWIKFKKCIYFIVMDPFVDLAITICIVLNTLFMAMEHHPMTEEFKNVLAIGNLVFTGIFAAEMVLKLIAMDPYEYFQVGWNIFDSLIVTLSLVELFLADVEGLSVLRSFRLLRVFKLAKSWPTLNMLIKIIGNSVGALGNLTLVLAIIVFIFAVVGMQLFGKSYKECVCKINDDCTLPRWHMNDFFHSFLIVFRVLCGEWIETMWDCMEVAGQAMCLIVYMMVMVIGNLVPHSDSANCTWGIRFGKYEC

SEQ ID NO: 98194 - protein, 57 aa, Homo sapiens
MAAQRIRAANSNGLPRCKSEGTLIDLSEGFSETSFNDIKVPSPSALLVDNPTPFGNA

SEQ ID NO: 98195 - protein, 125 aa, Homo sapiens
  MOD_RES (1)..(1): Any amino acid
XSYLDQGTQIFLNNSIEKSGWLFIQLYHSFVSSVFSLFMSRTSINGVLGINEWQNTGFQYDVISCLNLLDRCDQPLTLLKDIRSVLEPTRGRVILALVLPFHPYVENVGGKWEKPSEILEIKGQN

SEQ ID NO: 98196 - protein, 116 aa, Homo sapiens
  MOD_RES (1)..(1): Any amino acid
XGRQQNPGHTLEAGWFLLRHCIRKGDPELRAHVIDKFLLLPFHSGWDPDHGGLFYFQDADNFCPTQLEWAMKLWWPHSEAMIAFLMGYSDSGDPVLLRLFYQVAEYTFRQGLYRPG

SEQ ID NO: 98197 - protein, 509 aa, Homo sapiens
  MOD_RES (1)..(1): Any amino acid
XDFLILPGFIDFIADEVDLTSALTRKITLKTPLISSPMDTVTEADMAIAMALMGGIGFIHHNCTPEFQANEKFEQGFITDPVVLSPSHTVGDVLEAKMRHGFSGIPITETGTMGSKLVGIVTSRDIDFLAEKDHTTLLSEVMTPRIELVVAPAGVTLKEANEILQRSKKGKLPIVNDCDELVAIIARTDLKKNRDYPLASKDSQKQLLCGAAVGTREDDKYRLDLLTQAGVDVIVLDSSQGNSVYQIAMVHYIKQKYPHLQVIGGNVVTAAQAKNLIDAGVDGLRVGMGCGSICITQEVMACGRPQGTAVYKVAEYARRFGVPIIADGGIQTVGHVVKALALGASTVMMGSLLAATTEAPGEYFFSDGVRLKKYRGMGSLDAMEKSSSSQKRYFSEGDKVKIAQGVSGSIQDKGSIQKFVPYLIAGIQHGCQDIGARSLSVLRSMMYSGELKFEKRTMSAQIEGGVHGLHSYTFLPFTKSGCTEDSGGGRGGGGDAPQCPLLGTASLHN

SEQ ID NO: 98198 - protein, 114 aa, Homo sapiens
MSMEDYDFLFKIVLIGNAGVGKTCLVRRFTQGLFPPGQGATIGVDFMIKTVEINGEKVKLQIWDTAGQERFRSITQSYYRSANALILTYDITCEESFRCLPEWLREIEQYASNK

SEQ ID NO: 98199 - protein, 109 aa, Homo sapiens
MGDPFMLQQSTNPAPGILGPPPPSFHLGGPAVGPRGNLGAGNGNLQGPRHMQKGRVETSRVVHIMDFQRGKNLRYQLLQLVEPFGVISNHLILNKINEAFIEMATTEDA

SEQ ID NO: 98200 - protein, 486 aa, Homo sapiens
  MOD_RES (1)..(1): Any amino acid
XMVYFRAFSSLNTLPEELRPYVPLFCSVLTKLGCGLLDYREQAQQIELKTGGMSASPHVLPDDSHMDTYEQGVLFSSLCLDRNLPDMMQLWSEIFNNPCFEEEEHFKVLVKMTAQELANGIPDSGHLYASIRAGRTLTPAGDLQETFSGMDQVRLMKRIAEMTDIKPILRKLPRIKKHLLNGDNMRCSVNATPQQMPQTEKAVEDFLRSIGRSKKERRPVRPHTVEKPVPSSSGGDAHVPHGSQVIRKLVMFYSEKLCGVTELQCLALAPQHLAAECHGDGTPEMAPVPVPWAEPTFKPWQMKTHFLMPFPVNYVGECIRTVPYTDPDHASLKILARLMTAKFLHTEIREKGGAYGGGAKLSHNGIFTLYSYRDPNTIETLQSFGKAVDWAKSGKFTQQDIDEAKLSVFSTVDAPVAPSDKGMDHFLYGLSDEMKQAHREQLFAVSHDKLLAVSDRYLGTGKSTHGLAILGPENPKIAKDPSWIIQ

SEQ ID NO: 98201 - protein, 155 aa, Homo sapiens
MDGTEGSAGQPGPAERSHRSSVSSVGARADDTVVPLAVENLPSLSAHELHRAVREVLQLPDIALDVFALWLVSPLLDEPFLQFRRNVFFPKRRELQIHDEEVLRLLYEEAKGNVLAARYPCDVEDCEALGALVCRVQLGPYQPGRPAACDLREKL

SEQ ID NO: 98202 - protein, 62 aa, Homo sapiens
  MOD_RES (1)..(1): Any amino acid
XELHILEHRVRVLSVARPGLWLYTHPLIKLLFLPRRSRCAPGFGSADRGWGLCSRSGPGSED

SEQ ID NO: 98203 - protein, 102 aa, Homo sapiens
MKVARFQKIPNGENETMIPVLTSKKASELPVSEVASILQADLQNGLNKCEVSHRRAFHGWNEFDISEDEPLWKKYISQFKNPLIMLLLASAVISVLMHQFDD

SEQ ID NO: 98204 - protein, 612 aa, Homo sapiens
MFRCGGLAAGALKQKLVPLVRTVCVRSPRQRNRLPGNLFQRWHVPLELQMTRQMASSGASGGKIDNSVLVLIVGLSTVGAGAYAYKTMKEDEKRYNERISGLGLTPEQKQKKAALSASEGEEVPQDKAPSHVPFLLIGGGTAAFAAARSIRARDPGARVLIVSEDPELPYMRPPLSKELWFSDDPNVTKTLRFKQWNGKERSIYFQPPSFYVSAQDLPHIENGGVAVLTGKKVVQLDVRDNMVKLNDGSQITYEKCLIATGGTPRSLSAIDRAGAEVKSRTTLFRKIGDFRSLEKISREVKSITIIGGGFLGSELACALGRKARALGTEVIQLFPEKGNMGKILPEYLSNWTMEKVRREGVKVMPNAIVQSVGVSSGKLLIKLKDGRKVETDHIVAAVGLEPNVELAKTGGLEIDSDFGGFRVNAELQARSNIWAGDAACFYDIKLGRRRVEHHDHAVVSGRLAGENMTGAAKPYWHQSMFWSDLGPDVGYEAIGLVDSSLPTVGVFAKATAQDNPKSATEQSGTGIRSESETESEASEITIPPSTPAVPQAPVQGEDYGKGVIFYLRDKVVVGIVLWNIFNRMPIARKIIKDGEQHEDLNEVAKLFNIHED

SEQ ID NO: 98205 - protein, 165 aa, Homo sapiens
MANDPLEGFHEVNLASPTSPDLLGVYESGTQEQTTSPSVIYRPHPSALSSVPIQANALDVSELPTQPVYSSPRRLNCAEISSISFHVTDPAPCSTSGVTAGLTKLTTRKDNYNAEREFLQGATITEACDGSDDIFGLSTDSLSRLRSPSVLEVREKGYERLKEEL

SEQ ID NO: 98206 - protein, 164 aa, Homo sapiens
MSLEKQPASAKWYDRRDYVFIEFCVEDSKDVNVNFEKSKLTFSCLGGSDNFKHLNEIDLFHCIDPNDSKHKRTDRSILCCLRKGESGQSWPRLTKERAKLNWLSVDFNNWKDWEDDSDEDMSNFDRFSEMMNNMGGDEDVDLPEVDGADDDSQDSDDEKMPDLE

SEQ ID NO: 98207 - protein, 280 aa, Homo sapiens
  MOD_RES (1)..(1): Any amino acid
XKRLTPRFTLCPNGYYFAIDPNGYVLLHPNLQPKPIGVGIPTINLRKRRPNIQEPVTLDFLDAELENDIKVEIRNKMIDGESGEKTFRTLVKSQDERYIDKGNRTYTWTPVNGTDYSLALVLPTYSFYYIKAKLEETITQARYSETLKPDNFEESGYTFIAPRDYCNDLKISDNNTEFLLNFNEFIDRKTPNNPSCNADLINRVLLDAGFTNELVQNYWSKQKNIKGVKARFVVTDGGITRVYPKEAGENWQENPETYEDSFYKRSLDNDNYVFTAPYFN

SEQ ID NO: 98208 - protein, 157 aa, Homo sapiens
MRSMKALQKALSRAGSHCGRGGWGHPSRSPLLGGGVRHHLSEAAAQGRETPHSHQPQHQDHDSSESGMLSRLGDLLFYTIAEGQERIPIHKFTTALKATGLQTSDPRLRDCMSEMHRVVQESSSGGLLDRDLFRKCCSISTKWLGMNTWVSAMPLLS

SEQ ID NO: 98209 - protein, 119 aa, Homo sapiens
MDTFCSTLLLLTTPSWVLSQVTLKESGPALVKPTETLTLTCTLSGFSLSTSGMGMSWIRQPPGKALEWLAHIFLNDKKSYSTSLKNRLIISKDTSKSQVVLTMTNMDPVDTATYYCAWR

SEQ ID NO: 98210 - protein, 201 aa, Homo sapiens
  MOD_RES (1)..(1): Any amino acid
XTNSLHRMTTTSAAAYGTHLSPHVPHRVLSTSSTLTRDYNSLTRSEHSHSTTLPRDYSTLTSVSSHGELHRLNIPNPAQTSVVVEDLLPNHSYVFRVRAQSQEGWGREREGVITIESQVHPQSPLCPLPGSAFTLSTPSAPGPLVFTALSPDSLQLSWERPRRPNGDIVGYLVTCEMAQGGGPATAFRVDGDSPESRLTVP

SEQ ID NO: 98211 - protein, 176 aa, Homo sapiens
MAFVTRQFMRSVSSSSTASASAKKIIVKHVTVIGGGLMGAGIAQVIKTPMTSQKTFESLVDFSKALGKHPVSCKDTPGFIVNRLLVPYLMEAIRLYERGDASKEDIDTAMKLGAGYPMGPFELLDYVGLDTTKFIVDGWHEMDAENPLHQPSPSLNKLVAENKFGKKTGEGFYKYK

SEQ ID NO: 98212 - protein, 446 aa, Homo sapiens
MSRPPPTGKMPGAPETAPGDGAGASRQRKLEALIRDPRSPINVESLLDGLNSLVLDLDFPALRKNKNIDNFLNRYEKIVKKIRGLQMKAEDYDVVKVIGRGAFGEVQLVRHKASQKVYAMKLLSKFEMIKRSDSAFFWEERDIMAFANSPWVVQLFYAFQDDRYLYMVMEYMPGGDLVNLMSNYDVPEKWAKFYTAEVVLALDAIHSMGLIHRDVKPDNMLLDKHGHLKLADFGTCMKMDETGMVHCDTAVGTPDYISPEVLKSQGGDGFYGRECDWWSVGVFLYEMLVGDTPFYADSLVGTYSKIMDHKNSLCFPEDAEISKHAKNLICAFLTDREVRLGRNGVEEIRQHPFFKNDQWHWDNIRETAAPVVPELSSDIDSSNFDDIEDDKGDVETFPIPKAFVGNQLPFIGFTYYRENLLLSDSPSCRETDSIQSRKNEESQEVC

SEQ ID NO: 98213 - protein, 160 aa, Homo sapiens
MKQLIEDTEKNKVYVAMVTDYGAFIKIPGCRKQGLVHRTHMSSCRVDKPSEIVDVGDKVWVKLIGREMKNDRIKVSLSMKVVNQGTGKDLDPNNVIIERRRKRNIEIGSHLTLTAQTLRVIQARGQGTHQKTARQQRRRKRRRSTRRSTRSESIKSVGGG

SEQ ID NO: 98214 - protein, 138 aa, Homo sapiens
  MOD_RES (1)..(1): Any amino acid
XKQKERAMSTTSISSPQPDLPAEEPAPSTPPCLVQAEEEAVYEEPPEQETFYEQPPLVQQQGAGSEHIDHHIQGQGLSGQGLCARALYDYQAADDTEISFDPENLITGIEVIDEGWWRGYGPDGHFGMFPANYVELIE

SEQ ID NO: 98215 - protein, 80 aa, Homo sapiens
MGDNPFQPKSNSKMAELFMECEEEELEPWQKKVKEVEDDDDDEPIFVGEISSSKPAISNILNRVNPSSYSRGLKNGALSR

SEQ ID NO: 98216 - protein, 31 aa, Homo sapiens
MPVAATNSETAMQQVLDNLGSLPSATGAAEL

SEQ ID NO: 98217 - protein, 332 aa, Homo sapiens
MAVTDSLSRAATVLATVLLLSFGSVAASHIEDQAEQFFRSGHTNNWAVLVCTSRFWFNYRHVANTLSVYRSVKRLGIPDSHIVLMLADDMACNPRNPKPATVFSHKNMELNVYGDDVEVDYRSYEVTVENFLRVLTGRIPPSTPRSKRLLSDDRSNILIYMTGHGGNGFLKFQDSEEITNIELADAFEQMWQKRRYNELLFIIDTCQGASMYERFYSPNIMALASSQVGEDSLSHQPDPAIGVHLMDRYTFYVLEFLEEINPASQTNMNDLFQVCPKSLCVSTPGHRTDLFQRDPKNVLITDFFGSVRKVEITTETIKLQQDSEIMESRYSS

SEQ ID NO: 98218 - protein, 187 aa, Homo sapiens
MFPDQPEKPLNLAHIVPPRPVTSMNDTLFSHSVPSSGSPFITRSMLESSNRLDEEHRLIARYAARLAAESSSSQPPQQRSAPDISFTIDANKQQRQLIAELENKNREILQEIQRLRLEHEQASQPTPEKAQQNPTLLAELRLLRVSLLLPRLECNGTISVHCNLCLPDSAKMSWNRECLLSRRAGES

SEQ ID NO: 98219 - protein, 411 aa, Homo sapiens
MEQTEKSKVYAENGLLEKIKLCLSKKPLPSPTERKKFDHDFAISTSFHGIHNIVQNRSKIRRVLWLVVVLGSVSLVTWQIYIRLLNYFTWPTTTSIEVQYVEKMEFPAVTFCNLNRFQTDAVAKFGVIFFLWHIVSKVLHLQEITANSTGSREATDFAASHQNFSIVEFIRNKGFYLNNSTLLDCEFFGKPCSPKDFAHVFTEYGNCFTFNHGETLQAKRKVSVSGRGLSLLFNVNQEAFTDNPALGFVDAGIIFVIHSPKKVPQFDGLGLLSPVGMHARVTIRQVKTVHQEYPWGECNPNIKLQNFSSYSTSGCLKECKAQHIKKQCGCVPFLLPGYGIECDLQKYFSCVSPVLDHIEFKDLCTVGTHNSSCPVSCEEIEYPATISYSSFPSQKALKYLSKKLNQSRKYI

SEQ ID NO: 98220 - protein, 296 aa, Homo sapiens
MSEPPVYCNLVDLRRCPRSPPPGPACPLLQRLDAWEQHLDPNSGRCFYINSLTGCKSWKPPRRSRSETNPGSMEGTQTLKRNNDVLQPQAKGFRSDTGTPEPLDPQGSLSLSQRTSQLDPPALQAPRPLPQLLDDPHEVEKSGLLNMTKIAQGGRKLRKNWGPSWVVLTGNSLVFYREPPPTAPSSGWGPAGSRPESSVDLRGAALAHGRHLSSRRNVLHIRTIPGHEFLLQSDHETELRAWHRALRTVIERLDRENPLELRLSGSGPAELSAGEDEEEESELVSKPLLRLSSRRS

SEQ ID NO: 98221 - protein, 107 aa, Homo sapiens
  MOD_RES (1)..(1): Any amino acid
XMELDGRRIRVDFSITKRPHTPTPGIYMGRPTYGSSRRRDYYDRGYDRGYDDRDYYSRSYRGGGGGGGGWRAAQDRDQIYRRSPSPYYSRGGYRSRSRSRSYSPRRY

SEQ ID NO: 98222 - protein, 116 aa, Homo sapiens
  MOD_RES (1)..(1): Any amino acid
XIYSGRLRLPLDALPAHLLVASGLQMWQEAGAFALRLSRPQYSPLLLLKALLPLRALWEGREVNWEKCCKFRWKKKRRRRKMMMMRTRGQPHSLRLLSPREYQGFFPVLMDPTHCP

SEQ ID NO: 98223 - protein, 197 aa, Homo sapiens
  MOD_RES (1)..(1): Any amino acid
XRNKMFYAGTAFSDFLMGSSKDLAKHIRVVVSGARLPWVGGPEGREAEATWHMHLNTLPARLQCDGMDLTPKIQDLKPQCVVFLNIPRYCAGTMPWGHPGEHHDFEPQRHDDGYLEVIGFTMTSLAALQVGGHGERLTQCREVVLTTSKAIPVQVDGEPCKLAASRIRIALRNQATMVQKAKRRSAAPLHSDQQPVP

SEQ ID NO: 98224 - protein, 131 aa, Homo sapiens
MDSVAFEDVAVSFTQEEWALLDPSQKNLYRDVMQETFKNLTSVGKTWKVQNIEDEYKNPRRNLRRSFTLVAQAGVQRRDLGSPQPPPPGFKRFSCLSLPSSWDYKHAPPRQANFVFLVETGFLHVRLVSNS

SEQ ID NO: 98225 - protein, 133 aa, Homo sapiens
MDLQNLKRVRDDLRFRGVKGTTGTQASFLQLFEGDDHKVEQLDKMVTEKAGFKRAFIITGQTYTRKVDIEVLSVLASLGASVHKICTDIRLLANLKEMEEPFEKQQIGSSAMPYKRNPMRSERCCSLARHLMT

SEQ ID NO: 98226 - protein, 533 aa, Homo sapiens
GAGKTTTLSILSGLFPPSGGSAFILGHDVRSSMAAIRPHLGVCPQYNVLFDMLTVDEHVWFYGRLKGLSAAVVGPEQDRLLQDVGLVSKQSVQTRHLSGGMQRKLSVAIAFVGGSQVVILDEPTAGVDPASRRGIWELLLKYREGRTLILSTHHLDEAELLGDRVAVVAGGRLCCCGSPLFLRRHLGSGYYLTLVKARLPLTTNEKADTDMEGSVDTRQEKKNGSQGSRVGTPQLLALVQHWVPGARLVEELPHELVLVLPYTGAHDGSFATLFRELDTRLAELRLTGYGISDTSLEEIFLKVVEECAADTDMEDGSCGQHLCTGIAGLDVTLRLKMPPQETALENGEPAGSAPETDQGSGPDAVGRVQGWALTRQQLQALLLKRFLLARRSRRGLFAQIVLPALFVGLALVFSLIVPPFGHYPALRLSPTMYGAQVSFFSEDAPGDPGRARLLEALLQEAGLEEPPVQHSSHSPLSAGSRHQKFLLKWPRSWPVATGPQSLHPQPASVAGPVPGACCPTARLQLVVPLRPRQ

SEQ ID NO: 98227 - protein, 132 aa, Homo sapiens
PLVCKKIAQERLTVLLFLEDCIITACQEGLICTWARPGKAFTDEETEAQTGEGSWPRSPSKSVVEELGASELAQDKYVADFLQWAEPIVVRLKEVRLQRDDFEILKVIGRGAFSEVAVVKMKQTGQVYAMKI

SEQ ID NO: 98228 - protein, 313 aa, Homo sapiens
MYRISQLMSTPVASSSRLEREYAGELSPTCIFPSFTCDSLDGYHSFECGSIDPLTGSHYTCRRSPRLLTNGYYIWTEDSFLCDKDGNITLNPSQTSVMYKENLVRIFRKKKRICHSFSSLFNLSTSKSWLHGSIFGDINSSPSEDNWLKGTRRLDTDHCNGNADDLDCSSLTDDWESGKMNAESVITSSSSHIISQPPGGNSHSLSLQSQLTASERFQENSSDHSETRLLQEVFFQAILLAVCLIISACARWFMGEILASVFTCSLMITVACLSKFDNHLGMPSMNVLHLNIWKLSNLQSTWNQVFYWKGVSE

SEQ ID NO: 98229 - protein, 224 aa, Homo sapiens
MRTLFNLLWLALACSPVHTTLSKSDAKKAASKTLLEKSQFSDKPVQDRGLVVTDLKAESVVLEHRSYCSAKARDRHFAGDVLGYVTPWNSHGYDVTKVFGSKFTQISPVWLQLKRRGREMFEARLLALLVIPPAITPGTDQLGMFTHKEFEQLAPVLDGFSLMTYDYSTAHQPGPNAPLSWVRACVQVLDPKSKWRSKILLGLNFYGMDYATSKDAREPVVGAR

SEQ ID NO: 98230 - protein, 77 aa, Homo sapiens
MNEVVHTSPTIGSNVEEIVINNTRFLMWDIGGQESLRSSWNTYYTNTEFVIVVVDSTDRERISVTREELYKMLAHEK

SEQ ID NO: 98231 - protein, 1369 aa, Homo sapiens
MAALLRSARWLLRAGAAPRLPLSLRLLPGGPGRLHAASYLPAARAGPVAGGLLSPARLYAIAAKEKDIQEESTFSSRKISNQFDWALMRLDLSVRRTGRIPKKLLQKVFNDTCRSGGLGGSHALLLLRSCGSLLPELKLEERTEFAHRIWDTLQKLGAVYDVSHYNALLKVYLQNEYKFSPTDFLAKMEEANIQPNRVTYQRLIASYCNVGDIEGASKILGFMKTKDLPVTEAVFSALVTGHARAGDMENAENILTVMRDAGIEPGPDTYLALLNAYAEKGDIDHVKQTLEKVEKSELHLMDRDLLQIIFSFSKAGYPQYVSEILEKVTCERRYIPDAMNLILLLVTEKLEDVALQILLACPVSKEDGPSVFGSFFLQHCVTMNTPVEKLTDYCKKLKEVQMHSFPLQFTLHCALLANKTDLAKALMKAVKEEGFPIRPHYFWPLLVGRRKEKNVQGIIEILKGMQELGVHPDQETYTDYVIPCFDSVNSARAILQENGCLSDSDMFSQAGLRSEAANGNLDFVLSFLKSNTLPISLQSIRSSLLLGFRRSMNINLWSEITELLYKDGRYCQEPRGPTEAVGYFLYNLIDSMSDSEVQAKEEHLRQYFHQLEKMNVKIPENIYRGIRNLLESYHVPELIKDAHLLVESKNLDFQKTVQLTSSELESTLETLKAENQPIRDVLKQLILVLCSEENMQKALELKAKYESDMVTGGYAALINLCCRHDKVEDALNLKEEFDRLDSSAVLDTGKYVGLVRVLAKHGKLQDAINILKEMKEKDVLIKDTTALSFFHMLNGAALRGEIETVKQLHEAIVTLGLAEPSTNISFPLVTVHLEKGDLSTALEVAIDCYEKYKVLPRIHDVLCKLVEKGETDLIQKAMDFVSQEQGEMVMLYDLFFAFLQTGNYKEAKKIIETPGIRARSARLQWFCDRCVANNQVETLEKLVELTQKLFECDRDQMYYNLLKLYKINGDWQRADAVWNKIQEENVIPREKTLRLLAEILREGNQEVPFDVPELWYEDEKHSLNSSSASTTEPDFQKDILIACRLNQKKGAYDIFLNAKEQNIVFNAETYSNLIKLLMSEDYFTQAMEVKAFAETHIKGFTLNDAANSRLIITQVRRDYLKEAVTTLKTVLDQQQTPSRLAVTRVIQALAMKGDVENIEVVQKMLNGLEDSIGLSKMVFINNIALAQIKNNNIDAAIENIENMLTSENKVIEPQYFGLAYLFRKVIEEQLEPAVEKISIMAERLANQFAIYKPVTDFFLQLVDAGKVDDARALLQASTVKSVLELIPELNEKEEAYNSLMKSYVSEKDVTSAKALYEHLTAKNTKLDDLFLKRYASLLKYAGEPVPFIEPPESFEFYAQQLRKLRENSS

SEQ ID NO: 98232 - protein, 235 aa, Homo sapiens
MSDPHSSPLLPEPLSSRYKLYEAEFTSPSWPSTSPDTHPALPLLEMPEEKDLRSSNEDSHIVKIEKLNERSKRKDDGVAHRDSAGQRCICLSKAVGYLTGDMKEYRIWLKDKHLALQFIDWVLRGTAQVMFINNPLSGLIIFIGLLIQNPWWTITGGLGTVVSTLTALALGQDRSAIASGLHGYNGMLVGLLMAVFSEKLDYYWWLLFPVTFTAMSWMETDFNWSKSGCWKHLLQ

SEQ ID NO: 98233 - protein, 61 aa, Homo sapiens
MNRSIPVEVDESEPYPSQLLKPIPEYSPEEESEPPAPNIRNMAPNSLSAPTMLHNSSGDFS

SEQ ID NO: 98234 - protein, 66 aa, Homo sapiens
MAVSAGSARTSPSSGFLMVLDIPQERGLSSLDRKYLDGLDVCRFPLLDALRPLPLDWMETGPVVIS

SEQ ID NO: 98235 - protein, 1028 aa, Homo sapiens
MAMALQRVRIAEKYGKNYLCLLQAVFVAETDLLLRIKDISHFLMQDIAFLSGGRGKDNAWIITFPENCNFRCIPEEVIAKVLTYLTSIARQNGSDSRFTIILDRRLDTWSSLKISLQKISASFPGNLHLVLVLRPTSFLQRTFTDIGFWFSQEDFMLKLPVVMLSSVSDLLTYIDDKQLTPELGGTLQYCHSEWIIFRNAIENFALTVKEMAQMLQSFGTELAETELPDDIPSIEEILAIRAERYHLLKNDITAVTKEGKILLTNLEVPDTEGAVSSRLECHRQISGDWQTINKLLTQVHDMETAFDGFWEKHQLKMEQYLQLWKFEQDFQQLVTEVEFLLNQQAELADVTGTIAQVKQKIKKLENLDENSQELLSKAQFVILHGHKLAANHHYALDLICQRCNELRYLSDILVNEIKAKRIQLSRTFKMHKLLQQARQCCDEGECLLANQEIDKFQSKEDAQKALQDIENFLEMALPFINYEPETLQYEFDVILSPELKVQMKTIQLKLENIRSIFENQQAGFRNLADKHVRPIQFVVPTPENLVTSGTPFFSSKQGKKTWRQNQSNLKIEVVPDCQEKRSSGPSSSLDNGNSLDVLKNHVLNELIQTERVYVRELYTVLLGYRAEMDNPEMFDLMPPLLRNKKDILFGNMAEIYEFHNDIFLSSLENCAHAPERVGPCFLERKDDFQMYAKYCQNKPRSETIWRKYSECAFFQECQRKLKHRLRLDSYLLKPVQRITKYQLLLKELLKYSKDCEGSALLKKALDAMLDLLKSVNDSMHQIAINGYIGNLNELGKMIMQGGFSVWIGHKKGATKMKDLARFKPMQRHLFLYEKAIVFCKRRVESGEGSDRYPSYSFKHCWKMDEVGITEYVKGDNRKFEIWYGEKEEVYIVQASNVDVKMTWLKEIRNILLKQQELLTVKKRKQQDQLTERDKFQISLQQNDEKQQGAFISTEETELEHTSTVVEVCEAIASVQAEANTVWTEASQSAEISEEPAEWSSNYFYPTYDENEEENRPLMRPVSEMALLY

SEQ ID NO: 98236 - protein, 55 aa, Homo sapiens
MDGPAIITQVTNPKEDEGRLPGAGEKDSLSEKGKKTSGRRIRKLSTHLGGRCNPR

SEQ ID NO: 98237 - protein, 138 aa, Homo sapiens
MFYEALDKYGDLIALGFKRQDKWEHISYSQYYLLARRAAKGFLKLGLKQAHSVAILGFNSPEWFFSAVGTVFAGGIVTGIYTTSSPEACQYIAYDCCANVIMVDTQKQLEKILKIWKQLPHLKAVVIYKEPPPNKMAN

SEQ ID NO: 98238 - protein, 193 aa, Homo sapiens
MLLLLLLAPLFLRPPGAGGAQTPNATSEGCQIIHPPWEGGIRYRGLTRDQVKAINFLPVDYEIEYVCRGEREVVGPKVRKCLANGSWTDMDTPSRCVRICSKSYLTLENGKVFLTGGDLPALDGARVDFRCDPDFHLVGSSRSICSQGQWSTPKPHCQGTLPSETQASALPGLQHGQVWEGAGDQAREAGRQW

SEQ ID NO: 98239 - protein, 93 aa, Homo sapiens
MVLYTTPFPNSCLSALHCVSWALIFPCYWLVDRLAASFIPTTYEKRQRADDPCCLQLLCTALFTPIYLALLVASLPFAFLGFLFWSPLQSARR

SEQ ID NO: 98240 - protein, 412 aa, Homo sapiens
LTDRQTDTAPSPSYHLLPGRRRTVDAAASRGQGPEPAPGGGVEGVGARGVALKLFVQLLGCSRFGGAVVRAGEAEPSGAARSASSGREEPQPEEGEEEEEKEEERGPQWRLGARKPGSWTGEAAVCADSAPAARAPQALARASGRGGRVARRGAEESGPPHSPSRRGSASRAGPGRASETMNFLLSWVHWSLALLLYLHHAKWSQAAPMAEGGGQNHHEVVKFMDVYQRSYCHPIETLVDIFQEYPDEIEYIFKPSCVPLMRCGGCCNDEGLECVPTEESNITMQIMRIKPHQGQHIGEMSFLQHNKCECRPKKDRARQEKKSVRGKGKGQKRKRKKSRYKSWSVYVGARCCLMPWSLPGPHPCGPCSERRKHLFVQDPQTCKCSCKNTDSRCKARQLELNERTCRCDKPRR

SEQ ID NO: 98241 - protein, 88 aa, Homo sapiens
  MOD_RES (1)..(1): Any amino acid
XVQRRFVQEVVQSQQVAVGRQLEDFRSKRLMGMTPWEQELAQLEAWVGRDRASYEARERHVAERLLMHLEEMQTATLRCILGGWGPQA

SEQ ID NO: 98242 - protein, 240 aa, Homo sapiens
MEDTPPSLSCSDCQRHFPSLPELSRHRELLHPSPNQDSEEADSIPRPYRCQQCGRGYRHPGSLVNHRRTHETGLFPCTTCGKDFSNPMALKSHMRTHAPEGRRRHRPPRPKEATPHLQGETVSTDSWGQRLGSSEGWENQTKHTEETPDCESVPDPRAASGTWEDLPTRQREGLASHPGPEDGADGWGPSTNSARAPPLPIPASSLLSNLEQYLAESVVNFTGGQEPTQSPPAEEERRYK

SEQ ID NO: 98243 - protein, 163 aa, Homo sapiens
MRRVVRQSKFRHVFGQAVKNDQCYDDIRVSRVTWDSSFCAVNPRFVAIIIEASGGGAFLVLPLHKTGRIDKSYPTVCGHTGPVLDIDWCPHNDQVIASGSEDCTVMVWQIPENGLTLSLTEPVVILEGHSKRVGIVAWHPTARNVLLSAGCDNAIIIWNVGTG

SEQ ID NO: 98244 - protein, 69 aa, Homo sapiens
MASLTVKAYLLGKEDAAREIRRFSFCCSPEPEAEAEAAAGPGPCERLLSRVAALFPALRPGGFQAHYRG

SEQ ID NO: 98245 - protein, 131 aa, Homo sapiens
MADPRVRQIKIKTGVVKRLVKEKVMYEKEAKQQEEKIEKMRAEDGENYDIKKQAGLQLLASSDPPTPASQSPGMISAEILQESRMMIPDCQRRLEAAYLDLQRILENEKDLEEAEEYKEARLVLDSVKLEA

SEQ ID NO: 98246 - protein, 196 aa, Homo sapiens
MILAHCNLCCPTSSNSPGSVSQVAGITGVHHHTRLVFVFLGEMGFHHVGQAGLELLTSEFKEAFSLFDKDGDGTITTKELGTVMRSLGQNPTEAELQDMINEVDADGNGTIDFPEFLTMMARKMKDTDSEEEIREAFRVFDKDGNGYISAAELRHVMTNLGEKLTDEEVDEMIREADIDGDGQVNYEEFVQMMTAK

SEQ ID NO: 98247 - protein, 146 aa, Homo sapiens
MAPQAVPGHAGRPPPPLVKVIEDLPKNKLSSSDLKMKVTSGRVQQPAKSRESKMQTRILKQDLTGDFESKKNELPDGLNKKRLQILLKGYGEYPTKYRMFIWRSLLQLPENHTAFSTLIDKGTHVAFLNLQKKYPIKSRKLLRVLQ

SEQ ID NO: 98248 - protein, 69 aa, Homo sapiens
KGNGKKHKVSHLRTSSSEAHIPDQETTSLTSGTGTPGAEAEQQDTASVEQSSQKECGQPAGSGDPKSSK

SEQ ID NO: 98249 - protein, 111 aa, Homo sapiens
  MOD_RES (1)..(1): Any amino acid
XSIPEGLDFPNASTGNPSTSQAWLGLLAGAHSSLDIASFYWTLTNNDTHTQEPSAQQGEEVLRQLQTLAPKGVNVRMVDMQKLTHGVLHTKFWVVDQTHFYLGSANMDWRS

SEQ ID NO: 98250 - protein, 183 aa, Homo sapiens
MEEIDRFQVPTAHSEMQPLDPAAASISDGDCDAREGESVAMNYKPSPLQVKLEKQRELARKGSLKNGSMGSPVNQQPKKNNVMARTRLVVPNKGYSSLDQSPDEKPLVALDTDSDDDFDMSRYSSSGYSSAEINQDLNIQLLKDGYRLDEIPDDEDLDLIPPKSVNPTCMCCQATSSTACHIQ

SEQ ID NO: 98251 - protein, 70 aa, Homo sapiens
MSTQRLRNEDYHDYSSTDVSPEESPSEGLNNLSSPGSYQRFGQSNSTTWFQTLIHLLKGNIGTGLLGLPL

SEQ ID NO: 98252 - protein, 141 aa, Homo sapiens
MDIEDEENMSSSSTDVKENRNLDNVSPKDGSTPGPGEGSQLSNGGGGGPGRKRPLEEGSNGHSKYRLKKRRKTPGPVLPKNALMQLNEIKPGLQYTLLSQTGPVHAPLFVMSVEVNGQVFEGSGPTKKKAKLHAAEKALRS

SEQ ID NO: 98253 - protein, 71 aa, Homo sapiens
MGSKAKKRVLLPTRPAPPTVEQILEDVRGAPAEDPVFTILAPEGWSAVARSRLTAGSDSPVQAILLPQPPE

SEQ ID NO: 98254 - protein, 161 aa, Homo sapiens
MPLVINQSPPCCCVDDTWAQAEVGPVTSCTGFVEGSSRTGGMGSACIKVTKYFLFLFNLIFFILGAVILGFGVWILADKSSFISVLQTSSSSLRMGAYVFIGVGAVTMLMGFLGCIGAVNEVRCLLGLYFAFLLLILIAQVTAGALFYFNMGKLKQEMGGI

SEQ ID NO: 98255 - protein, 100 aa, Homo sapiens
MTPDHFPSLFCKEMSVGYANGIRVMSMTHTGEPGFMLYIPIEYALHVYNEVMSVGQKYGIRNAGYYALRSLRIEKFFAFWGQDINNLTTPLECGRESRVK

SEQ ID NO: 98256 - protein, 46 aa, Homo sapiens
MSVHQIRKHAVLPPIICRSDKEFLESVQRYIITETERLGCSEEGPA

SEQ ID NO: 98257 - protein, 372 aa, Homo sapiens
MEEKGSRMVQQGNQEAAAAPDTMAQPYASAQFAPPQNGIPAEYTAPHPHPAPEYTGQTTVPEHTLNLYPPAQTHSEQSPADTSAQTVSGTATTDDAAPTDGQPQTQPSENTENKSQPKRLHVSNIPFRFRDPDLRQMFGQFGKILDVEIIFNERGSKGFGFVTFENSADADRAREKLHGTVVEGRKIEVNNATARVMTNKKTVNPYTNGWKLNPVVGAVYSPEFYAGTVLLCQANQEGSSMYSAPSSLVYTSAMPGFPYPAATAAAAYRGAHLRGRGRTVYNTFRAAAPPPPIPAYGGVVYQDGFYGADIYGGYAAYRYAQPTPATAAAYSDSYGRVYAADPYHHALAPAPTYGVGAMASIYRGGYNRFAPY

SEQ ID NO: 98258 - protein, 92 aa, Homo sapiens
MELFQAKDHYILQQGERALWCSRRDGGLQLRPATDLLLAWNPICLGLVEGVIGKIQLHSEDSNWGHVYSAYLLCLCVLAHCRAIQKYSVPRC

SEQ ID NO: 98259 - protein, 67 aa, Homo sapiens
MSRKQNQKDSSGFIFDLQSNTVLAQGGAFENMKEKINAVRAIVPNKSNNEIILVLQHFDNCVDKTVQ

SEQ ID NO: 98260 - protein, 1340 aa, Homo sapiens
MGLLQLLAFSFLALCRARVRAQEPEFSYGCAEGSCYPATGDLLIGRAQKLSVTSTCGLHKPEPYCIVSHLQEDKKCFICNSQDPYHETLNPDSHLIENVVTTFAPNRLKIWWQSENGVENVTIQLDLEAEFHFTHLIMTFKTFRPAAMLIERSSDFGKTWGVYRYFAYDCEASFPGISTGPMKKVDDIICDSRYSDIEPSTEGEVIFRALDPAFKIEDPYSPRIQNLLKITNLRIKFVKLHTLGDNLLDSRMEIREKYYYAVYDMVVRGNCFCYGHASECAPVDGFNEEVEGMVHGHCMCRHNTKGLNCELCMDFYHDLPWRPAEGRNSNACKKCNCNEHSISCHFDMAVYLATGNVSGGVCDDCQHNTMGRNCEQCKPFYYQHPERDIRDPNFCERCTCDPAGSQNEGICDSYTDFSTGLIAGQCRCKLNVEGEHCDVCKEGFYDLSSEDPFGCKSCACNPLGTIPGGNPCDSETGHCYCKRLVTGQHCDQCLPEHWGLSNDLDGCRPCDCDLGGALNNSCFAESGQCSCRPHMIGRQCNEVEPGYYFATLDHYLYEAEEANLGPGVSIVERQYIQDRIPSWTGAGFVRVPEGAYLEFFIDNIPYSMEYDILIRYEPQLPDHWEKAVITVQRPGRIPTSSRCGNTIPDDDNQVVSLSPGSRYVVLPRPVCFEKGTNYTVRLELPQYTSSDSDVESPYTLIDSLVLMPYCKSLDIFTVGGSGDGVVTNSAWETFQRYRCLENSRSVVKTPMTDVCRNIIFSISALLHQTGLACECDPQGSLSSVCDPNGGQCQCRPNVVGRTCNRCAPGTFGFGPSGCKPCECHLQGSVNAFCNPVTGQCHCFQGVYARQCDRCLPGHWGFPSCQPCQCNGHADDCDPVTGECLNCQDYTMGHNCERCLAGYYGDPIIGSGDHCRPCPCPDGPDSGRQFARSCYQDPVTLQLACVCDPGYIGSRCDDCASGYFGNPSEVGGSCQPCQCHNNIDTTDPEACDKETGRCLKCLYHTEGEHCQFCRFGYYGDALQQDCRKCVCNYLGTVQEHCNGSDCQCDKATGQCLCLPNVIGQNCDRCAPNTWQLASGTGCDPCNCNAAHSFGPSCNEFTGQCQCMPGFGGRTCSECQELFWGDPDVECRACDCDPRGIETPQCDQSTGQCVCVEGVEGPRCDKCTRGYSGVFPDCTPCHQCFALWDVIIAELTNRTHRFLEKAKALKISGVIGPYRETVDSVERKVSEIKDILAQSPAAEPLKNIGNLFEEAEKLIKDVTEMMAQVEVKLSDTTSQSNSTAKELDSLQTEAESLDNTVKELAEQLEFIKNSDIREMGSCYAAQAGLELLDSSDPPVSDF

SEQ ID NO: 98261 - protein, 115 aa, Homo sapiens
MGTSLLCWMALCLLGADHADTGVSQDPRHKITKRGQNVTFRCDPISEHNRLYWYRQTLGQGPEFLTYFQNEAQLEKSRLLSDRFSAERPKGSFSTLEIQRTEQGDSAMYLCASSL

SEQ ID NO: 98262 - protein, 76 aa, Homo sapiens
MVQAHGGRSRAQPLTLSLGAAMTQPPPEKTPAKKHVRLQERRSLQTLSAPKTWTSLATPPRTDTRPSCQIPRAVSV

SEQ ID NO: 98263 - protein, 138 aa, Homo sapiens
MTPTSGGSTPPGITAPAVPSIPSPIGVNGFTGLPPQANGQPAAEAVFANGIHPYPAQSPTAADPLQQAYAGVQQYAGPAYPAAYGQISQAFPQPPPMIPQQQREGFVSFDNPASAQTAIQAMNGFQIGMKRLKVQLKR

SEQ ID NO: 98264 - protein, 70 aa, Homo sapiens
MGKKLDLSKLTDEEAQHVLEVVQRDFDLRRKEEERLEALKGKIKKESSKRELLSDTAHLNETHCARCLQP

SEQ ID NO: 98265 - protein, 47 aa, Homo sapiens
  MOD_RES (1)..(1): Any amino acid
XSLMDTGLPRCCNEKIELAILWFLDQFRKTYVGDQLQRTSKKTDIFL

SEQ ID NO: 98266 - protein, 171 aa, Homo sapiens
MAYRSLDVPGPSDPPTAASQVAGITGNPDSVSNTPEMEQRETTSSTPRISSKTGSIPLKTPAKDSEGGWFIDKTPSVKKDSFFLDLSCEKSNPKKPITEIQDSKDSSLLESDMKRKGKLKNKGSKRKKEDLQEVDGEIEAVLQKKAKARGLEFQISNVKFEDVGGNDMTLK

SEQ ID NO: 98267 - protein, 546 aa, Homo sapiens
MLAGGVDSLEAMTRRRQYGEVANLLQGVMNVLEHFHKYMGIPQIRQLSERVKAAQTELGQQILADFEEAFPSQGTKRPGGPSNVLRDACLVANILDPRIKQEIIKKFIKQHLSEYLVLFQENQDVAWLDKIDRRYAWIKRQLVDYEEKYGRMFPREWCMAERIAVEFCHVTRAELAKIMRTRAKEIEVKLLLFAIQRTTNFEGFLAKRFSGCTLTDGTLKKLESPPPSTNPFLEDEPTPEMEELATEKGDLDQPKKPKAPDNPFHGIVSKCFEPHLYVYIESQDKNLGELIDRFVADFKAQGPPKPNTDEGGAVLPSCADLFVYYKKCMVQCSQLSTGEPMIALTTIFQKYLREYAWKILSGNLPKTTTSSGGLTISSLLKEKEGSEVAKFTLEELCLICNILSTAEYCLATTQQLEEKLKEKVDVSLIERINLTGEMDTFSTVISSSIQLLVQDLDAACDPALTAMSKMQWQNVEHVGDQSPYVTSVILHIKQNVPIIRDNLASTRKYFTQFCVKFANSFIPKFITHLFKCKPISMVGAEQVRWT

SEQ ID NO: 98268 - protein, 570 aa, Homo sapiens
MAAALRVAAVGARLSVLASGLRAAVRSLCSQATSVNERIENKRRTALLGGGQRRIDAQHKRGKLTARERISLLLDPGSFVESDMFVEHRCADFGMAADKNKFPGDSVVTGRGRINGRLVYVFSQIRASAMSPRLVSDSWTQAIHLPWPPKVLGLQDFTVFGGSLSGAHAQKICKIMDQAITVGAPVIGLNDSGGARIQEGVESLAGYADIFLRNVTASGVIPQISLIMGPCAGGAVYSPALTDFTFMVKDTSYLFITGPDVVKSVTNEDVTQEELGGAKTHTTMSGVAHRAFENDVDALCNLRDFFNYLPLSSQDPAPVRECHDPSDRLVPELDTIVPLESTKAYNMVDIIHSVVDEREFFEIMPNYAKNIIVGFARMNGRTVGIVGNQPKVASGCLDINSSVKGARFVRFCDAFNIPLITFVDVPGFLPGTAQEYGGIIRHGAKLLYAFAEATVPKVTVITRKAYGGAYDVMSSKHLCGDTNYAWPTAEIAVMGAKGAVEIIFKGHENVEAAQAEYIEKFANPFPAAVRGFVDDIIQPSSTRARICCDLDVLASKKVQRPWRKHANIPL

SEQ ID NO: 98269 - protein, 152 aa, Homo sapiens
MFPRPGALSWTVRRHTPRQVEPPCVCMTLTSRRQDSQEARPECQAWTGTLLLGTCLLYCARSSMPICTVSMSQDFGWNKKEAGIVLSSFFWGYCLTQVVGGHLGDRIGGEKVILLSASAWGSITAVTPLLAHLSSAHLAFMTFSRILMGLLQ

SEQ ID NO: 98270 - protein, 133 aa, Homo sapiens
  MOD_RES (1)..(1): Any amino acid
XAAMATARVRMGPRCAQALWRMPWLPVFLSLAAAAAAAAAEQQVPLVLWSSDRDLWAPAADTHEGHITSDLQLSTYLDPALELGPRNVLLFLQDKVRPPQPTLPRSSGGSQAPSPHDTDAHSPREASVTLSQL

SEQ ID NO: 98271 - protein, 54 aa, Homo sapiens
MWSWKCLLFWAVLVTATLCTARPSPTLPEQDALPSSEDDDDDDDSSSEEKETDN

SEQ ID NO: 98272 - protein, 126 aa, Homo sapiens
MCQLGLLQKPHVYEFASDIAPFLCHPNLWIRYGAVGFITVVARQISTADVYCKLMPYLDPYITQPIIQIERKLVLLSVLKEPVSRSIFDYALRSKDITSLFRHLHMRQKKRNGSLPDCPPPEDPAI

SEQ ID NO: 98273 - protein, 304 aa, Homo sapiens
  MOD_RES (1)..(1): Any amino acid
XDDLGFLPEDDVPHLLGLGWNWASWRQSPPRAALRPAVSSSDQQSLIRKLQKRGSPSDVVTPIVTQHSKVNDSNELGGLTTSGSAEVHKAITISSPLTTDLTAELSGGPKNVSVQPEISEGLATTPSTQQVKSSEKTQIAVPQPVAPSYSYATPTPQASFQSTSAPYPGETYTYDWQLITHPRDYSGEMEGKHSQILKLSKLTPGLYEFKVIVEGQNAHGEGYVNVTVKPEPRKNRPPIAIVSPQFQEISLPTTSTVIDGSQSTDDDKIVQYHWEELKGPLREEKISEDTAILKLSKLVPGNYT

SEQ ID NO: 98274 - protein, 89 aa, Homo sapiens
MNTPNGNSLSAAELTCGMIMCLARQIPQATASMKDGKWERKKFMGTELNGKTLGILGLGRIGREVATRMQSFGMKTIGYDPIISPEVSA

SEQ ID NO: 98275 - protein, 929 aa, Homo sapiens
MQGLPDPPSQRGIIPRAFEHVFESVQCAENTKFLVRASYLEIYNEDVRDLLGADTKQKLELKEHPEKGVYVKGLSMHTVHSVAQCEHIMETGWKNRSVGYTLMNKDSSRSHSIFTISIEMSAVDERGKDHLRAGKLNLVDLAGSERQSKTGATGERLKEATKINLSLSALGNVISALVDGRCKHVPYRDSKLTRLLQDSLGGNTKTLMVACLSPADNNYDETLSTLRYANRAKNIRNKPRINEDPKDALLREYQEEIKKLKAILTQQMSPSSLSALLSRQVPPDPVQVEEKLLPQPVIQHDVEAEKQLIREEYEERLARLKADYKAEQESRARLEEDITAMRNSYDVRLSTLEENLRKETEAVLQVGVLYKAEVMSRAEFASSAEYPPAFQYETVVKPKVFSTTDTLPSDDVSKTQVSSRFAELPKVEPSKSEISLGSSESSSLEETSVSEAFPGPEEPSNVEVSMPTEESRSRYFLDECLGQEAAGHLLGEQNYLPQEEPQEVPLQGLLGLQDPFAEVEAKLARLSSTVARTDAPQADVPKVPVQVPAPTDLLEPSDARPEAEAADDFPPRPEVDLASEVALEVVRTAEPGVWLEAQAPVALVAQPEPLPATAGVKRESVGMEVAVLTDDPLPVVDQQQVLARLQLLEQQVVGGEQAKNKDLKEKHKRRKRYADERRKQLVAALQNSDEDSGDWVLLNVYDSIQEEVRAKSKLLEKMQRKLRAAEVEIKDLQSEFQLEKIDYLATIRRQERDSMLLQQLLEQVQPLIRRDCNYSNLEKILRESCWDEDNGFWKIPHPVITKTSLPVAVSTGPQNKPARKTSAADNGEPNMEDDRYRLMLSRSNSENIASNYFRSKRASQILSTDARKSLTHHNSPPGLSCPLSNNSAIPPTQAPEMPQPRPFRLESLDIPFTKAKRKKSKSNFGSEPL

SEQ ID NO: 98276 - protein, 319 aa, Homo sapiens
MARRGPGWRPLLLLVLLAGAAQGGLYFRRGQTCYRPLRGDGLAPLGRSTYPRPHEYLSPADLPKSWDWRNVDGVNYASITRNQHIPQYCGSCWAHASTSAMADRINIKRKGAWPSTLLSVQNVIDCGNAGSCEGGNDLSVWDYAHQHGIPDETCNNYQAKDQECDKFNQCGTCNEFKECHAIRNYTLWRVGDYGSLSGREKMMAEIYANGPIRVMLAFRFDGTCDAVILQDGEEKLHEVRGIRRSNDVQHLRGGAQGDFFRTLVRGIHRHPGEMAISLEKIPPHPHRPVTPPISNIQMPRVVMEVKCVIQLLQAEGAFW

SEQ ID NO: 98277 - protein, 462 aa, Homo sapiens
MKTRRTTRLQQQHSEQPPLQPSPVMTRRGLRDSHSSEEDEASSQTDLSQTISKKTVRSIQEAPVSEDLVIRLRRPPLRYPRYEATSVQQKVNFSEEGETEEDDQDSSHSSVTTVKARSRDSDESGDKTTRSSSQYIESFWQSSQSQNFTAHDKQPSVLSSGYQKTPQEWAPQTARIRTRMQNDSILKSELGNQSPSTSSRQVTGQPQNASFVKRNRWWLLPLIAALASGSFWFFSTPEVETTAVQEFQNQMNQLKNKYQGQDEKLWKRSQTFLEKHLNSSHPRSQPAILLLTAARDAEEALRCLSEQIADAYSSFRSVRAIRIDGTDKATQDSDTVKLEVDQELSNGFKNGQNAAVVHRFESFPAGSTLIFYKYCDHENAAFKDVALVLTVLLEEETLGTSLGLKEVEEKVRDFLKVKFTNSNTPNSYNHMDPDKLNGLWSRISHLVLPVQPENALKRGICL

SEQ ID NO: 98278 - protein, 66 aa, Homo sapiens
MAAQIPESDQIKQFKEFLGTYNKLTETCFLDCVKDFTTREVKPEEEYHIQQNEALAAKAGLLGQPR

SEQ ID NO: 98279 - protein, 56 aa, Homo sapiens
MEPGAQRGNLEVGIRKKIEHDVVMKASSSLPKKLALLKAPAKKKGAAAATSSKTPS

SEQ ID NO: 98280 - protein, 866 aa, Homo sapiens
LKERMDEPNAEQVYNPSQFENLRKFWDLEANSNSKDNDKNITTTSQKNSAPFNRQKHKEFSDIKLSGKNTHEAEVLLSPKKVMAREEMEKLNSKGILQVLPDEITFPLSPLRKYTYQLPGNESSKENVEKNTEGIVTPVFKEEKDYSEQEIQESIIKTNVLSKDCKDTFNDSLQKLLSETSTPAIQPSGGKVHGKQVLEPSVSENRTWPQKTDFADTEEEVKGPEKIINEHVDKTVVHPKVKRNSLTASLDKLLKEATGTSPSPLQAKLAPVITGTNSKLEEGRFFGKGIEQSHNTSADKREILAPFPVRDETFGNTALLKKAESGECQLSTQNLIQMAAEDSHPLDPTSQLSRKGSFGDVASPPQDMLFPQDAHLVPQARVHPSQTEISETVEKVILPPRPVLNDVSAALQKLCGEVWLSYPAGREVGPGEVNPEFPEAVQPVCSPLNPPGVISPWATMDTIVPDRKDFYSSNVVPDKTHEVGSYLAAQMSPSDQTLSSFASIVAQYGKGLPQEVEEIVRETIVQPKSEFLEFSAGLEKLLKEETETFPSKYESDTGNLSPSKLIGSTEEPRRATSECHPEELKETVEKAEAPLITESAFDAGFEKLLKEITEAPPYQPQVSVREETHEKESSQSEQTRFLGTVPHFYRAASQTSEMKDKSNGLESQVNQCDKMLGGDALVTDLLVDFCGSRSGVEIPRTPQLYVAHEIGTIKTVTPPEDRDSESGVAGGQGTLQEPGFGEASEAISVSRNRQPIPLLMNKENSTKTSKVELTLASPYMKQEKEEEKEGFSESDFSDGNTSSNAESWRNPSSSEEEPSPVLKTLERSAARKMPSKSLEDISSDSSNQAKVDNQPEELVRSAEDDF

SEQ ID NO: 98281 - protein, 42 aa, Homo sapiens
MATVEPETTPTPNPPTTEEEKTESNQEVANPEHYIKHPLQNR

SEQ ID NO: 98282 - protein, 165 aa, Homo sapiens
MVLEWCCSGRRRLTSEPLPDHADISNCGNSFQLVSEGASWRGLPHCSCAEFQDSLNFSYHPSGLSLHLRPPSRGNSPKEQPFSQVLRPEPPDPEKLPVPPAPPSKRHCRSLSVPVDLSRWQPVWRPAPSKLWTPIKHRGSGGGGGPQVPHQSPPKRVSSLRFLQA

SEQ ID NO: 98283 - protein, 35 aa, Homo sapiens
  MOD_RES (1)..(1): Any amino acid
XFYDLRYLSEEVSSAKHYAGQRIQDKSHMIPVYVE

SEQ ID NO: 98284 - protein, 37 aa, Homo sapiens
MSTSLGSNLSELDRLLLELNAVQHNPPGFPADEANSS

SEQ ID NO: 98285 - protein, 70 aa, Homo sapiens
MAHELVMFRDVAIDVSQEEWECLNPAQRNLYKEARVQWRDLGSPQPLPPSFKQFSCLSLPSSCDYRTFCF

SEQ ID NO: 98286 - protein, 154 aa, Homo sapiens
LPTGKPSRVWCCRPLRRAARPCSSKSMIASGWGHRNALTAADLNLVLYVCETVDPAQVFGQPPCPLSQPVLLSLIQQLASDLGTRTDLKLSYLEEAVMHLDHSDPITRDHMGSVMAQVRQKLFQFLQAEPHNSLGKAARRLSLMLHGLVTPSLP

SEQ ID NO: 98287 - protein, 174 aa, Homo sapiens
MEQDDPVEALTELRERRLGALELLQAAAGSGLAAYAVWALLLQPGFRRVPLRLQVPYVGASARQVEHVLSLLRGRPGKTVDLGSGDGRIVLAAHRCGLRPAVGYELNPWLVALARLHAWRAGCAGSVCYRRKDLWKVSLRDCRNVSVFLAPSVVGAGLPAPLGSPSHTPGCLLL

SEQ ID NO: 98288 - protein, 42 aa, Homo sapiens
MWSVLQDGPISRVIVFSLSAAKETKDRPLQDEYSVLVASMLE

SEQ ID NO: 98289 - protein, 355 aa, Homo sapiens
MATLLLLLGVLVVSPDALGSTTAVQTPTSGEPLVSTSEPLSSKMYTTSITSDPKADSTGDQTSALPPSTSINEGSPLWTSIGASTGSPLPEPTTYQEVSIKMSSVPQETPHATSHPAVPITANSLGSHTVTGGTITTNSPETSSRTSGAPVTTAASSLETSRGTSGPPLTMATVSLETSKGTSGPPVTMATDSLETSTGTTGPPVTMTTGSLEPSSGASGPQVSSVKLSTMMSPTTSTNASTVPFRNPDENSRGMLPVAVLVALLAVIVLVALLLLWRRRQKRRTGALVLSRGGKRNGVVDAWAGPAQVPEEGAVTVTVGGSGGDKGSGFPDGEGSSRRPTLTTFFGRRKSRQGS

SEQ ID NO: 98290 - protein, 255 aa, Homo sapiens
MCEPEFGNDKAREPSVGGRWRVSWYERFVQPCLVELLGSALFIFIGCLSVIENGTDTGLLQPALAHGLALGLVIATLGNISGGHFNPAVSLAAMLIGGLNLVMLLPYWVSQLLGGMLGAALAKAVSPEERFWNASGAAFVTVQEQGQVAGALVAEIILTTLLALAVCMGAINEKTKGPLAPFSIGFAVTVDILAGGPVSGGCMNPARAFGPAVVANHWNFHWIYWLGPLLAGLLVGLLIRCFIGDGKTRLILKAR

SEQ ID NO: 98291 - protein, 455 aa, Homo sapiens
MQLPRWWELGDPCAWTGQGRGTRRMSPATTGTFLLTVYSIFSKVHSDRNVYPSAGVLFVHVLEREYFKGEFPPYPKPGEISNDPITFNTNLMGYPDRPGWLRYIQRTPYSDGVLYGSPTAENVGKPTIIEITAYNRRTFETARHNLIINIMSAEDGVLLSSPRLECNGTISANCNLRLLGSDFPLPYQAEFFIKNMNVEEMLASEVLGDFLGAVKNVWQPERLNAINITSALDRGGRVPLPINDLKEGVYVMVGADVPFSSCLREVENPQNQLRCSQEMEPVITCDKKFRTQFYIDWCKISLVDKTKQVSTYQEVIRGEGILPDGGEYKPPSDSLKSRDYYTDFLITLAVPSAVALVLFLILAYIMCCRREGVIQLVHHSAIQKSTKELRDMSKNREIAWPLSTLPVFHPVTGEIIPPLHTDNYDSTNMPLMQTQQNLPHQTQIPQQQTTGKWYP

SEQ ID NO: 98292 - protein, 381 aa, Homo sapiens
MVPHLLLLCLLPLVRATEPHEGRADEQSAEAALAVPNASHFFSWNNYTFSDWQNFVGRRRYGAESQNPTVKALLIVAYSFIIVFSLFGNVLVCHVIFKNQRMHSATSLFIVNLAVADIMITLLNTPFTLVIMHPLKPRISITKGVIYIAVIWTMATFFSLPHAICQKLFTFKYSEDIVRSLCLPDFPEPADLFWKYLDLATFILLYILPLLIISVAYARVAKKLWLCNMIGDVTTEQYFALRRKKKKTIKMLMLVVVLFALCWFPLNCYVLLLSSKVIRTNNALYFAFHWFAMSSTCYNPFIYCWLNENFRIELKALLSMCQRPPKPQEDRPPSPVPSFRVAWTEKNDGQRAPLANNLLPTSQLQSGKTDLSSVEPIVTMS

SEQ ID NO: 98293 - protein, 138 aa, Homo sapiens
EKQLECLLTHCIKVPMLVLDPALPANITLKDLPSLYPSFHSASDIFNVAKPKNPSTNVSVVVFDSTKDVEDAHSGLLKGNSRQTVWRGYLTTDKEVPGLVLMQDLAFLSGFPPTFKETNQLKTKLPENLSSKVKLVRT

SEQ ID NO: 98294 - protein, 242 aa, Homo sapiens
MGLHLRPYRVGLLPDGLLFLLLLLMLLADPALPAGRHPPVVLVPGDLGNQLEAKLDKPTVVHYLCSKKTESYFTIWLNLELLLPVIIDCWIDNIRLECSGAISAHYTSASQAQALLLPQTPDNWDYRLVYNKTSRATQFPDGVDVRVPGFGKTFSLEFLDPSKSSVGSYFHTMVESLVGWGYTRGEDVRGAPYDWRRAPTAAAGLEGQVYPGLRVTGCALGGRGQDPARPGFRRQQPDPSHR

SEQ ID NO: 98295 - protein, 672 aa, Homo sapiens
MTYDDIPHLSAKIKPKQQKVELEMAIDTLNPNYCRSKGEQIALNVDGACADETSTYSSKLMDKQTFCSSQTTSNTSRYAAALYRQGELHLTPLHGILQLRPSFSYLDKADAKHREREAANEAGDSSQDEAEDDVKQITVRFSRPESEQARQRRVQSYEFLQKKHAEEPWVHLHYYGLRDSRSEHERQYLLCPGSSGVENTELVKSPSEYLMMLMPPSQEEEKDKPVAPSNVLSMAQLRTLPLADQIKILMKNVKVMPFANLMSLLGPSIDSVAVLRGIQKVAMLVQGNWVVKSDILYPKDSSSPHSGVPAEVLCRGRDFVMWKFTQSRWVVRKEVATVTKLCAEDVKDFLEHMAVVRINKGWEFILPYDGEFIKKHPDVVQRQHMLWTGIQAKLEKVYNLVKETMPKKPDAQSGPAGLVCGDQRIQVAKTKAQQNHALLERELQRRKEQLRVPAVPPGVRIKEEPVSEEGEEDEEQEAEEEPMDTSPSGLHSKLANGLPLGRAAGTDSFNGHPPQGCASTPVARELKAFVEATFQRQFVLTLSELKRLFNLHLASLPPGHTLFSGISDRMLQDTVLAAGCKQILVPFPPQTAASPDEQKVFALWESGDMSDQHRQVLLEIFSKNYRVRRNMIQSRLTQECGEDLSKQEVDKVLKDCCVSYGGMWYLKGTVQS

SEQ ID NO: 98296 - protein, 86 aa, Homo sapiens
  MOD_RES (1)..(1): Any amino acid
XKKGGGGAGTATESAPGPSGQSVAPIPQPPAESESGSESEPDAGPGPRPGPLQRKQPIGPEDVLGLQRITGGWSSQWETSLSTTSA

SEQ ID NO: 98297 - protein, 58 aa, Homo sapiens
MSEAPRFFVGPEDTEINPGNYRHFFHHADEDDEEEDDSPPERQIVVGICSMAKKSKSK

SEQ ID NO: 98298 - protein, 1361 aa, Homo sapiens
  MOD_RES (1)..(1): Any amino acid
XSHTVFIDYQEKERTDRPNFELSQRKSLGTPTVICTPTEESVFFPGNGESDRLVANDSQLTPLEEWSNNRGPVEVADNMELSKSATCKNIKDVQSPGFLNEPLSSKSQRRKSLKLKNDKTIVFSENHKNDMDITQSCMVEIDNESALEDKEDFHLAGASKTILYSCGQDDMEITRSHTTALECKTLLPNEIAIRPMDKTVLFTDNYSDLEVTDSHTVFIDCQATEKILEENPKFGIGKGKNLGVSFPKDNSCVQEIAEKQALAVGNKIVLHTEQKQQLFAATNRTTNEIIKFHSAAMDEKVIGKVVDQACTLEKAQVESCQLNNRDRRNVDFTSSHATAVCGSSDNYSCLPNVISCTDNLEGSAMLLCDKDEEKANYCPVQNDLAYANDFASEYYLESEGQPLSAPCPLLEKEEVIQTSTKGQLDCVITLHKDQDLIKDPRNLLANQTLVYSQDLGEMTKLNSKRVSFKLPKDQMKVYVDDIYVIPQPHFSTDQPPLPKKGQSSINKEEVILSKAGNKSLNIIENSSAPICENKPKILNSEEWFAAACKKELKENIQTTNYNTALDFHSNSDVTKQVIQTHVNAGEAPDPVITSNVPCFHSIKPNLNNLNGKTGEFLAFQTVHLPPLPEQLLELGNKAHNDMHIVQATEIHNINIISSNAKDSRDEENKKSHNGAETTSLPPKTVFKDKVRRCSLGIFLPRLPNKRNCSVTGIDDLEQIPADTTDINHLETQPVSSKDSGIGSVAGKLNLSPSQYINEENLPVYPDEINSSDSINIETEEKALIETYQKEISPYENKMGKTCNSQKRTWVQEEEDIHKEKKIRKNEIKFSDTTQDREIFDHHTEEDIDKSANSVLIKNLSRTPSSCSSSLDSIKADGTSLDFSTYRSSQMESQFLRDTICEESLREKLQDGRITIREFFILLQVHILIQKPRQSNLPGNFTVNTPPTPEDLMLSQYVYRPKIQIYREDCEARRQKIEELKLSASNQDKLLVDINKNLWEKMRHCSDKELKAFGIYLNKIKSCFTKMTKVFTHQGKVALYGKLVQSAQNEREKLQIKIDEMDKILKKIDNCLTEMETETKNLEDEEKNNPVEEWDSEMRAAEKELEQLKTEEEELQRNLLELEVQKEQTLAQIDFMQKQRNRTEELLDQLSLSEWDVVEWSDDQAVFTFVYDTIQLTITFEESVVGFPFLDKRYRKIVDVNFQSLLDEDQAPPSSLLVHKLIFQYVEEKESWKKTCTTQHQLPKMLEEFSLVVHHCRLLGEEIEYLKRWGPNYNLMNIDINNNELRLLFSSSAAFAKFEITLFLSAYYPSVPLPSTIQNHVGNTSQDDIATILSKVPLENNYLKNVVKQIYQDLFQDCHFYH

SEQ ID NO: 98299 - protein, 78 aa, Homo sapiens
MAVSSQEAVSLHPGNQAIELSSENRKPLVMEGKKRHLHRFTNWCSQNARHNTDNLQNSRNRRNIRTTQKNYVNLDLDF

SEQ ID NO: 98300 - protein, 144 aa, Homo sapiens
MQGSTRRMGVMTDVHRRFLQLLMTHGVLEEWDVKRLQTHCYKVHDRNATVDKLEDFINNINSVLESLYIEIKRGVTEDDGRPIYALVNLATTSISKMATDFAENELDLFRKALELIIDSETGFASSTNILNLVDQLKGKKMRKK

SEQ ID NO: 98301 - protein, 142 aa, Homo sapiens
MGERAYHGAQVCSGTNPRKCQDLGDSILLLLGSFILLNVWINVVTLLWKHLKSSLRILFRHFFPKGFLLRRVNHLDSWIPDTNDEKVSACCCVPPKCGHAGVPRESARGLYKAGMMGGGEAPQVTASKAQASLLSRPETSSQ

SEQ ID NO: 98302 - protein, 561 aa, Homo sapiens
VQAAIPQTQLMLAGGQITGLTLTPAQQQLLLQQAQAQAQLLAAAVQQHSASQQHSAAGATISASAATPMTQIPLSQPIQIAQDLQQLQQLQQQNLNLQQFVLVHPTTNLQPAQFIISQTPQGQQGLLQAQNLLTQLPQQSQANLLQSQPSITLTSQPATPTRTIAATPIQTLPQSQSTPKRIDTPSLEEPSDLEELEQFAKTFKQRRIKLGFTQGDVGLAMGKLYGNDFSQTTISRFEALNLSFKNMCKLKPLLEKWLNDAENLSSDSSLSSPSALNSPGIEGLSRRRKKRTSIETNIRVALEKSFLENQKPTSEEITMIADQLNMEKEVIRVWFCNRRQKEKRINPPSSGGTSSSPIKAIFPSPTSLVATTPSLVTSSAATTLTVSPVLPLTSAAVTNLSVTGTSDTTSNNTATVISTAPPASSAVTSPSLSPSPSASASTSEASSASETSTTQTTSTPLSSPLGTSQVMVTASGLQTAAAAALQGAAQLPANASLAAMAAAAGLNPSLMAPSQFAAGGALLSLNPGTLSGALSPALMSNSTLATIQGLLHGLENFLTKN

SEQ ID NO: 98303 - protein, 242 aa, Homo sapiens
  MOD_RES (1)..(1): Any amino acid
XMMQAGQRVVDNPIYLSDMGAALTGAESHELQDVLEETNVEEKIKQTHRKYLLQEQLKIIKKELGLEKDDKDAIEEKFRERLKELVVPKHVMDVVDEELSKLGLLDNHSSEFNVTRNYLDWLTSIPWGKYSNENLDLARAQAVLEEDHYGMEDVKKRILEFIAVSQLRGSTQGKILCFYGPPGVGKTSIARSIARALNREYFRFSVGGMTDVAEIKGHRRTYVGAMPGKIIQCLKKTKTENP

SEQ ID NO: 98304 - protein, 253 aa, Homo sapiens
MVPGSEGPARAGSVVADVVFVIEGTANLGPYFEGLRKHYLLPAIEYFNGGPPAETDFGGDYGGTQYSLVVFNTVDCAPESYVQCHAPTSSAYEFVTWLDGIKFMGGGGESCSLIAEGLSTALQLFDDFKKMREQIGQTHRVCLLICNSPPYLLPAVESTTYSGCTTENLVQQIGERGIHFSIVSPRKLPALRLLFEKAAPPALLEPLQPPTDVSQDPRHMVLVRGLVLPAGPAAQRHGGRHPHGSHLNPQHPI

SEQ ID NO: 98305 - protein, 151 aa, Homo sapiens
MKEDCLPSSHVPISDSKSIQKSELLGLLKTYNCYHEGKSFQLRHREEEGTLIIEGLLNIAWGLRRPIRLQMQDDREQVHLPSTSWMPRRPSCPLGCWSLLLGLSSLSLPAAISALQLSVFRKEPSPQNGNITAQGPSIQPVHKAESSTDSS

SEQ ID NO: 98306 - protein, 171 aa, Homo sapiens
MPRDGVPAGNTTPAAAQAAAQSPDSATAGAPQVLDSLKRYPDWNPEILPSRRNEGNRKENETPRRRSHSPSPRRSRRSSSSHRFRRSRSPMHYMYRPRSRSPRICHRFISRYRSRSRSRSPYRIRNPFRGSPKCFRSVSPERMSRRSVRSSDRKKALEDVVQRSGHGTEFN

SEQ ID NO: 98307 - protein, 106 aa, Homo sapiens
MRALLARLLLCVLVVSDSKGSNELHQVPSNCDCLNGGTCVSNKYFSNIHWCNCPKKFGGQHCEIDKSKTCYEGNGHFYRGKASTDTMGRPCLPWNSATVLQQTYHA

SEQ ID NO: 98308 - protein, 60 aa, Homo sapiens
MSQGLALLPRLDCSGRIIAYCNLHLPGSGNPPSSASRVAETTGTRPHSRDSVTFADVAVN

SEQ ID NO: 98309 - protein, 14 aa, Homo sapiens
MKMLLLLHCLGVFL

SEQ ID NO: 98310 - protein, 129 aa, Homo sapiens
HERNGCRLCKSDKYCEPHDYEYCCPCEWHRTEHDRQLSEVENNIKKKACCCEGFPFHEVIQEFLLNKDKLVKVIRYQRPDLLLFQRFTLEKMEWPNHYACEKLLVLLTHYDMIERKLGSRNSNQLQPIR

SEQ ID NO: 98311 - protein, 74 aa, Homo sapiens
  MOD_RES (1)..(1): Any amino acid
XAWAVSPETELTVSRHGFEQTTDVLPFILKSSLGASCEPTAFPLPPAAPGPCAHLFIWMLAECTPCSPVWSSIS

SEQ ID NO: 98312 - protein, 63 aa, Homo sapiens
MSDKDDIETPLLTEAAPILEDGNCEPAKNSESVDQGAKPESKSEPVVSTRKRPETKPSSDLET

SEQ ID NO: 98313 - protein, 9 aa, Homo sapiens
MLSLKKYLT

SEQ ID NO: 98314 - protein, 38 aa, Homo sapiens
MRQHDTRNGRIVLISGRRSFCSIFSVLPYRDSTQVGQQ

SEQ ID NO: 98315 - protein, 3469 aa, Homo sapiens
MERSGWARQTFLLALLLGATLRARAAAGYYPRFSPFFFLCTHHGELEGDGEQGEVLISLHIAGNPTYYVPGQEYHVTISTSTFFDGLLVTGLYTSTSVQASQSIGGSSAFGFGIMSDHQFGNQFMCSVVASHVSHLPTTNLSFIWIAPPAGTGCVNFMATATHRGQVIFKDALAQQLCEQGAPTDVTVHPHLAEIHSDSIILRDDFDSYHQLQLNPNIWVECNNCETGEQCGAIMHGNAVTFCEPYGPRELITTGLNTTTASVLQFSIGSGSCRFSYSDPSIIVLYAKNNSADWIQLEKIRAPSNVSTIIHILYLPEDAKGENVQFQWKQENLRVGEVYEACWALDNILIINSAHRQVVLEDSLDPVDTGNWLFFPGATVKHSCQSDGNSIYFHGNEGSEFNFATTRDVDLSTEDIQEQWSEEFESQPTGWDVLGAVIGTECGTIESGLSMVFLKDGERKLCTPSMDTTGYGNLRFYFVMGGICDPGNSHENDIILYAKIEGRKEHITLDTLSYSSYKVPSLVSVVINPELQTPATKFCLRQKNHQGHNRNVWAVDFFHVLPVLPSTMSHMIQFSINLGCGTHQPGNSVSLEFSTNHGRSWSLLHTECLPEICAGPHLPHSTVYSSENYSGWNRITIPLPNAALTRNTRIRWRQTGPILGNMWAIDNVYIGPSCLKFCSGRGQCTRHGCKCDPGFSGPACEMASQTFPMFISESFGSSRLSSYHNFYSIRGAEVSFGCGVLASGKALVFNKDGRRQLITSFLDSSQSRFLQFTLRLGSKSVLSTCRAPDQPGEGVLLHYSYDNGITWKLLEHYSYLSYHEPRIISVELPGDAKQFGIQFRWWQPYHSSQREDVWAIDEIIMTSVLFNSISLDFTNLVEVTQSLGFYLGNVQPYCGHDWTLCFTGDSKLASSMRYVETQSMQIGASYMIQFSLVMGCGQKYTPHMDNQVKLEYSTNHGLTWHLVQEECLPSMPSCQEFTSASIYHASEFTQWRRVIVLLPQKTWSSATRFRWSQSYYTAQDEWALDSIYIGQQCPNMCSGHGSCDHGICRCDQGYQGTECHPEAALPSTIMSDFENQNGWESDWQEVIGGEIVKPEQGCGVISSGSSLYFSKAGKRQLVSWDLDTSWVDFVQFYIQIGGESASCNKPDSREEGVLLQYSNNGGIQWHLLAEMYFSDFSKPRFVYLELPAAAKTPCTRFRWWQPVFSGEDYDQWAVDDIIILSEKQKQIIPVINPTLPQNFYEKPAFDYPMNQMSVWLMLANEGMVKNETFCAATPSAMIFGKSDGDRFAVTRDLTLKPGYVLQFKLNIGCANQFSSTAPVLLQYSHDAGMSWFLVKEGCYPASAGKGCEGNSRELSEPTMYHTGDFEEWTRITIVIPRSLASSKTRFRWIQESSSQKNVPPFGLDGVYISEPCPSYCSGHGDCISGVCFCDLGYTAAQGTCVSNVPNHNEMFDRFEGKLSPLWYKITGAQVGTGCGTLNDGKSLYFNGPGKREARTVPLDTRNIRLVQFYIQIGSKTSGITCIKPRTRNEGLIVQYSNDNGILWHLLRELDFMSFLEPQIISIDLPQDAKTPATAFRWWQPQHGKHSAQWALDDVLIGMNDSSQTGFQDKFDGSIDLQANWYRIQGGQVDIDCLSMDTALIFTENIGKPRYAETWDFHVSASTFLQFEMSMGCSKPFSNSHSVQLQYSLNNGKDWHLVTEECVPPTIGCLHYTESSIYTSERFQNWKRITVYLPLSTISPRTRFRWIQANYTVGADSWAIDNVVLASGCPWMCSGRGICDAGRCVCDRGFGGPYCVPVVPLPSILKDDFNGNLHPDLWPEVYGAERGNLNGETIKSGTSLIFKGEGLRMLISRDLDCTNTMYVQFSLRFIAKSTPERSHSILLQFSISGGITWHLMDEFYFPQTTNILFINVPLPYTAQTNATRFRLWQPYNNGKKEEIWIVDDFIIDGNNVNNPVMLLDTFDFGPREDNWFFYPGGNIGLYCPYSSKGAPEEDSAMVFVSNEVGEHSITTRDLNVNENTIIQFEINVGCSTDSSSADPVRLEFSRDFGATWHLLLPLCYHSSSHVSSLCSTEHHPSSTYYAGTMQGWRREVVHFGKLHLCGSVRFRWYQGFYPAGSQPVTWAIDNVYIGPQCEEMCNGQGSCINGTKCICDPGYSGPTCKISTKNPDFLKDDFEGQLESDRFLLMSGGKPSRKCGILSSGNNLFFNEDGLRMLMTRDLDLSHARFVQFFMRLGCGKGVPDPRSQPVLLQYSLNGGLSWSLLQEFLFSNSSNVGRYIALEIPLKARSGSTRLRWWQPSENGHFYSPWVIDQILIGGNISGNTVLEDDFTTLDSRKWLLHPGGTKMPVCGSTGDALVFIEKASTRYVVSTDVAVNEDSFLQIDFAASCSVTDSCYAIELEYSVDLGLSWHPLVRDCLPTNVECSRYHLQRILVSDTFNKWTRITLPLPPYTRSQATRFRWHQPAPFDKQQTWAIDNVYIGDGCIDMCSGHGRCIQGNCVCDEQWGGLYCDDPETSLPTQLKDNFNRAPSSQNWLTVNGGKLSTVCGAVASGMALHFSGGCSRLLVTVDLNLTNAEFIQFYFMYGCLITPNNRNQGVLLEYSVNGGITWNLLMEIFYDQYSKPGFVNILLPPDAKEIATRFRWWQPRHDGLDQNDWAIDNVLISGSADQRTVMLDTFSSAPVPQHERSPADAGPVGRIAFDMFMEDKTSVNEHWLFHDDCTVERFCDSPDGVMLCGSHDGREVYAVTHDLTPTEGWIMQFKISVGCKVSEKIAQNQIHVQYSTDFGVSWNYLVPQCLPADPKCSGSVSQPSVFFPTKGWKRITYPLPESLVGNPVRFRFYQKYSDMQWAIDNFYLGPGCLDNCRGHGDCLREQCICDPGYSGPNCYLTHTLKTFLKERFDSEEIKPDLWMSLEGGSTCTECGILAEDTALYFGGSTVRQAVTQDLDLRGAKFLQYWGRIGSENNMTSCHRPICRKEGVLLDYSTDGGITWTLLHEMDYQKYISVRHDYILLPEDALTNTTRLRWWQPFVISNGIVVSGVERAQWALDNILIGGAEINPSQLVDTFDDEGTSHEENWSFYPNAVRTAGFCGNPSFHLYWPNKKKDKTHNALSSRELIIQPGYMMQFKIVVGCEATSCGDLHSVMLEYTKDARSDSWQLVQTQCLPSSSNSIGCSPFQFHEATIYNSVNSSSWKRITIQLPDHVSSSATQFRWIQKGEETEKQSWAIDHVYIGEACPKLCSGHGYCTTGAICICDESFQGDDCSVFSHDLPSYIKDNFESARVTEANWETIQGGVIGSGCGQLAPYAHGDSLYFNGCQIRQAATKPLDLTRASKIMFVLQIGSMSQTDSCNSDLSGPHAVDKAVLLQYSVNNGITWHVIAQHQPKDFTQAQRVSYNVPLEARMKGVLLRWWQPRHNGTGHDQWALDHVEVVLDEKSYIASKPDQTFMTNHSAACIERHFLTCVIFHYLLSLVFH

SEQ ID NO: 98316 - protein, 82 aa, Homo sapiens
MGQTALAGGSSSTPTPQALYPDLSCPEGLEELLSAPPPDLGAQRRHGWNPKDCSENIEVKEGGLYFERRPVAQSTDGARGKR

SEQ ID NO: 98317 - protein, 292 aa, Homo sapiens
  MOD_RES (1)..(1): Any amino acid
XYKHIVGKRGDTRKKIEMETKTSISIPKPGQDGEIVITGQHRNGVISARTRIDVLLDTFRRKQPFTHFLAFFLNEVEVQEGFLRFQEEVLAKCSMDHGVDSSIFQNPKKLHLTIGMLVLLSEEEIQQTCEMLQQCKEEFINDISGGKPLEVEMAGIEYMNDDPGMVDVLYAKVHMKDGSNRLQELVDRVLERFQASGLIVKEWNSVKLHATVMNTLFRKDPNAEGRYNLYTAEGKYIFKERESFDGRNILKSFALLPRLEYNDAISAHCNLCLPGSSDSPASASQVAGITVV

SEQ ID NO: 98318 - protein, 211 aa, Homo sapiens
  MOD_RES (1)..(1): Any amino acid
XSPAHSPRENGLDKTRLLKKDAPISPASIASSSSTPSSKSKELSLKRDMGKLSETRLSEDEQCTLGLQRWFCRLWFMNEKSTTPVSKSNTPTPRTDAPTPGSNSTPGLRPVPGKPPGVDPLASSLRTPMAVPCPYPTPFGIVPHAGMNGELTSPGAAYAGLHNISPQMSAAAAAAAAAAAYGRSPVVGFDPHHHMRVPAIPPNLTGIPGGK

SEQ ID NO: 98319 - protein, 367 aa, Homo sapiens
MDGFYDQQVPYMVTNSQRGRNCNEKPTNVRKRKFINRDLAHDSEELFQDLSQLQETWLAEAQVPDNDEQFVPDYQAESLAFHGLPLKIKKEPHSPCSEISSACSQEQPFKFSYGEKCLYNVSAYDQKPQVGMRPSNPPTPSSTPVSPLHHASPNSTHTPKPDRAFPAHLPPSQSIPDSSYPMDHRFRRQLSEPCNSFPPLPTMPREGRPMYQRQMSEPNIPFPPQGFKQEYHDPVYEHNTMVGSAASQSFPPPLMIKQEPRDFAYDSEVPSCHSIYMRQEGFLAHPSRTEGCMFEKGPRQFYDDTCVVPEKFDGFSNVALSVIILRGICLSTDHRRHQTRARNVSGRTHIPTARITSALAVFGSSSG

SEQ ID NO: 98320 - protein, 106 aa, Homo sapiens
MVPPPPGEESQTVILPPGWQSYLSPQGRRYYVNTTTNETTWERPSSSPGIPASPGSHRSSLPPTVNGYHASGTPAHPPETAHMSVRKSTGDSQNLGSSSPSKKQSK

SEQ ID NO: 98321 - protein, 503 aa, Homo sapiens [sequence omitted]

SEQ ID NO: 98322 - protein, 133 aa, Homo sapiens
MVNHSLHPTEPVKVTLPDAFLPAQVCSARIQENGSLITILVIAGVFWIHRLIKFIYNICCYWEIHSFYLHALRIPMSALPYCTWQEVQARIVQTQKEHQICIHKRELTELDIYHRILRFQNYMVALVNKSLLP

SEQ ID NO: 98323 - protein, 102 aa, Homo sapiens
MAQTDKPTCIPPELPKMLKEFAKAAIRAQPQDLIQWGADYFEALSRGETPPVRERSERVALCNWAELTPELLKILHSQVAGRLIIRAEELAQMWKVVNLPTD

SEQ ID NO: 98324 - protein, 272 aa, Homo sapiens
  MOD_RES (1)..(1): Any amino acid
XSVQSPFTRSAQSSPECAAARRPLESDQGDPFTLFNVFNAWVQVKSERSRNSRKWCRRRGIEEHRLYEMANLRRQFKELLEDHGLLAGAQAAQVGDSYSRLQQRRERRALHQLKRQHEEGAGRRRKVLRLQEEQDGGSSDEDRAGPAPPGASDGVDIQDVKFKLRHDLAQLQAAASSAQDLSREQLALLKLVLGRGLYPQLAVPDAFNSSRKDSDQIFHTQAKQGAVLHPTCVFAGSPEVLHAQELEASNCDGSRGMAACWESHSDLADLLV

SEQ ID NO: 98325 - protein, 201 aa, Homo sapiens
MEINTKLLISVTCISFFTFQLLFYFVSYWFSAKVSPGFNSLSFKKKIEWNSRVVSTCHSLVVGIFGLYIFLFDEATKADPLWGGPSLANVNIAIASGYLISDLSIIILYWKVIGDKFFIMHHCASLYAYYLVLKNGVLAYIGNFRLLAELSSPFVNQRPKAVVTGNMDLFSSLTLHLSTLSLQSPANNQDRWDRVQNSHKS

SEQ ID NO: 98326 - protein, 167 aa, Homo sapiens
  MOD_RES (1)..(1): Any amino acid
XCIQMVTDIQTAVRTNSTFVQALVEHVKEECDRLGPGMADICKNYISQYSEIAIQMMMHMQDQQPKEICALVGFCDEVKEMPMQTLVPAKVASKNVIPALELVEPIKKHEVPAKSDVYCEVCEFLVKEVTKLIDNNKTEKEILDAFDKMCSKLPKSLSEECQEVVDT

SEQ ID NO: 98327 - protein, 460 aa, Homo sapiens
MRITTGIYCLYLCNFIDGVLTLNAENTNYAYQVPNFHKCEICLLSFPKESQFQRHMRDHERNDKPHRCDQCPQTFNVEFNLTLHKCTHSGEDPTCPVCNKKFSRVASLKAHIMLHEKEENLICSECGDEFTLQSQLAVHMEEHRQELAGTRQHACKACKKEFETSSELKEHMKTHYKIRVSSTRSYNRNIDRSGFTYSCPHCGKTFQKPSQLTRHIRIHTGERPFKCSECGKAFNQKGALQTHMIKHTGEKPHACAFCPAAFSQKGNLQSHVQRVHSEVKNGPTYNCTECSCVFKSLGSLNTHISKMHMGGPQNSTSSTETAHVLTATLFQTLPLQQTEAQATSASSQPSSQAVSDVIQQLLELSEPAPVESGQSPQPGQQLSITVGINQDILQQALENSGLSSIPAAAHPNDSCHAKTSAPHAQNPDVSSVSNEQTDPTDAEQEKEQESPEKLDKKEKK

SEQ ID NO: 98328 - protein, 397 aa, Homo sapiens
MRVMAPRTLILLLSGALALTETWACSHSMRYFYTAVSRPGRGEPRFIAVGYVDDTQFVRFDSDAASPRGEPRAPWVEQEGPEYWDRETQKYKRQAQTDRVSLRNLRGYYNQSEAGSHTLQWMYGCDLGPDGRLLRGYDQSAYDGKDYIALNEDLRSWTAADTAAQITQRKWEAARAAEQQRAYLEGTCVEWLRRYLENGKETLQRAEHPKTHVTHHLVSDHEATLRCWALGFYPAEITLTWQRDGEDQTQDTELVETRPAGDGTFQKWAAVVVPSGEEQRYTCHVQHEGLPEPLTLRWEPSSQPTIPIVGIVAGLAVLAVLAVLGAVVAVVMCRRKSSGREGVRSGVWPATVPRALMSLSSLVKPETAACVGLRCRISSHLSFVTSRASGISFCKGI

SEQ ID NO: 98329 - protein, 74 aa, Homo sapiens
MDTCGVGYVALGEAGPVGNMTVVDSPGQEVLNQLDVKTSSEMTSAEASVEMSLPTPLPGFEDSPDQRRLPPEQE

SEQ ID NO: 98330 - protein, 10 aa, Homo sapiens
MSQPPIGGAA

SEQ ID NO: 98331 - protein, 249 aa, Homo sapiens
  MOD_RES (1)..(1): Any amino acid
XGVGGTQRRGQTFTDPPYVHGGWIEVSTAKKEDINLSVRKLLNRHNIVFGDYTWTEFDEPFLTRNVQSVSIIDTELKVKDSQPIDLSACTVALHIFQLNEDGPSSENLEEETENIIAANHWVLPAAEFHGLWDSLVYDVEVKSHLLDYVMTTLLFSDKNVNSNLITWNRVVLLHGPPGTGKTSLCKALAQKLTIRLSSRYRYGQLIEINSHSLFSKWFSESGKLVTKMFQKIQDLIDDKDALVFVLIDE

SEQ ID NO: 98332 - protein, 21 aa, Homo sapiens
MPPRPSSGELWGIHLMPPRIL

SEQ ID NO: 98333 - protein, 51 aa, Homo sapiens
MQQDGLGVGTRNGSGKGRSVHPSWPWCAPRPLSSCQGHPGDRVQPLPRGDP

SEQ ID NO: 98334 - protein, 196 aa, Homo sapiens
MASQKQMEVVTKGTGFRRRPKTITYTPGTCELLRGGDALPLQCSPTSSQRVLPSKQIASPIYLPPILAARPHLRPANMCQANGAYSREQFKPQATRDLEKEKQRLQNIFATGKDMEERKRKAPPARQKAPAPELDRFEELVKEIQERKEFLADMEALGQGKQYRGIILAEISQKLREMEDIDHRRSEELRKGLATT

SEQ ID NO: 98335 - protein, 262 aa, Homo sapiens
MIFTFMTRKSCCSKQVQRKYWRNCQKLTATGSAPFPLALQRFSVVWDACSEALIMFDKDNLDDMGYIVENDVIMHALTKQLEAVSDRVTVLYRSKAIRYTWPCPFPMADSSPWVHITLGDGSTFQTKLLIGADGHNSGVRQAVGIQNVSWNYDQSAVVATLHLSEATENNVAWQRFLPSGPIALLPLSDTLSSLVWSTSHEHAAELVSMDEEKFVDAVNSAFWSDADHTDFIDTAGAMLQYAVSLLKPTKVSARQLPPSVAR

SEQ ID NO: 98336 - protein, 48 aa, Homo sapiens
MRLSVRRVLLAAGCALVLVLAVQLGQQVLECRAVLAGLRSPRGAMRPE

SEQ ID NO: 98337 - protein, 264 aa, Homo sapiens
MESRKDITNQEEIWKMKPRRNLEDNDYLHEDTGETSMLKRPVLLHLQQTAHADEFDCPSELQHAQELFPQWHLPIKIAAVMASLTFLYTLLREVIHPLATSHQQYFYKIPILVINKVLPMVSITLLALVYLPGVIAAIVQVHNGTKYKKFPHWLDKWMLTRKQFGLLSLFFAVLHAIYTLSYAMRRSYRYKLLNWAYQQVQQNKEDAWIEHDVWRMEIYVSLGIVGLAILALLAVTSIPSVSDSLTWREFHYIQVHGRINFLTL

SEQ ID NO: 98338 - protein, 37 aa, Homo sapiens
MMAKNKEPRPPSYTISIVGLSGTEKDKGNCGVGKSCL

SEQ ID NO: 98339 - protein, 106 aa, Homo sapiens
MNLTEGPLAMAEMDPTQGRVVFEDVAIYFSQEEWGHLDEAQRLLYRDVMLENLALLSSLGFIAVAAMLMDAGQDYMVFEDVAIHFSQEEWGILNDVQRHLHSDVML

SEQ ID NO: 98340 - protein, 53 aa, Homo sapiens
MESTLTLATEQPVKKNTLKKYKIACIGLSPLGSHLTTTSVSQAQVILLPQPPE

SEQ ID NO: 98341 - protein, 1161 aa, Homo sapiens
MADNLDEFIEEQKARLAEDKAELESDPPYMEMKGKLSAKLSENSKILISMAKENIPPNSQQTRGSLGIDYGLSLPLGEDYERKKHKLKEELRQDYRRYLTQKNFLSTSETDPSTLGVSLPIGERLSAKERLKLERNKEYNQFLRGKEESSEKFRQVEKSTEPKSQRNKKPIGQVKPDLTSQIQTSCENSEGPRKDVLTPSEAYEELLNQRRLEEDRYRQLDDEIELRNRRIIKKANEEVGISNLKHQRFASKAGIPDRRFHRFNEDRVFDRRYHRPDQDPEVSEEMDERFRYESDFDRRLSRVYTNDRMHRNKRGNMPPMEHDGDVIEQSNIRISSAENKSAPDNETSKSANQDTCSPFAGMLFGGEDRELIQRRKEKYRLELLEQMAEQQRNKRREKDLELRVAASGAQDPEKSPDRLKQFSVAPRHFEEMIPPERPRIAFQTPLPPLSAPSVPPIPSVHPVPSQNEDLRSGLSSALGEMVSPRIAPLPPPPLLPPLATNYRTPYDDAYYFYGSRNTFDPSLAYYGSGMMGVQPAAYVSAPVTHQLAQPVVNTVGQNELKITSDQVINSGLIFEDKPKPSKQSLQSYQEALQQQIREREERRKKEREEKEEYEAKLEAEMRTYNPWGKGGGGAPLRDAKGNLISHMQTQSSPFARGNVFGEPPTELQIKQQELYKNFLRFQIEEKKQREEAERERLRIAEEKEERRLAEQRARIQQEYEEEQEKKREKEEEQRLKNEEHIRLAEERQKEAERKKKEEEEKYNLQLQHYCERDNLIGEETKHMRQPSPIVPALQNKIASKLQRPPSVDSIIRSFIHESSMSRAQSPPVPARKNQLRAEEEKKNVIMELSEMRKQLRSEERRLQERLLHMDSDDEIPIRKKERNPMDIFDMARHRLQAPVRRQSPKGLDAATFQNVHDFNELKDRDSETRVDLKFMYLDPPRDHHTLEIQQQALLREQQKRLNRIKMQEGAKVDLDAIPSAKVREQRMPRDDTSDFLKNSLLESDSAFIGAYGETYPAIEDDVLPPPSQLPSARERRRNKWKGLDIDSSRPNVAPDGLSLKSISSVNVDELRVRNEERMRRLNEFHNKPINTDDESSLVDPDDIMKHIGDDGSNSVATEPWLRPGTSETLKRFMAEQLNQEQQQIPGKPGTFTWQGLSTAHG

SEQ ID NO: 98342 - protein, 334 aa, Homo sapiens
MGARGALLLALLLARAGLGKPGELGALQAGPGAARRPGGGGREGHFLCPAESQEEELLSEACGHREIHALVAGGVESARGRWPWQASLRLRRRHRCGGSLLSRRWVLSAAHCFQKHYYPSEWTVQLGELTSRPTPWNLRAYSSRYKVQDIIVNPDALGVLRNDIALLRLASSVTYNAYIQPICIESSTFNFVHRPDCWVTGWGLISPSGTPLPPPYNLREAQVTILNNTRCNYLFEQPSSRSMIWDSMFCAGAEDGSVDTCKGDSGGPLVCDKDGLWYQVGIVSWGMDCGQPNRPGVYTNISVYFHWIRRVMSHSTPRPNPSQLLLLLALLWAP

SEQ ID NO: 98343 - protein, 102 aa, Homo sapiens
MSVSRTMEDSCELDLVYVTERIIAVSFPSTANEENFRSNLREVAQMLKSKHGGNYLLFNLSERRPDITKLHAKVLEFGWPDLHTPALEKICSICKAMDTWLN

SEQ ID NO: 98344 - protein, 232 aa, Homo sapiens
VKLQQNPGKFDELDMSPGDPKWLDVIERDLHRQFPFHEMFVSRGGHGQQDLFRVLKAYTLYRPEEGYCQAQAPIAAVLLMHMPAEQAFWCLVQICEKYLPGYYSEKLEAIQLDGEILFSLLQKVSPVAHKHLSRQKIDPLLYMTEWFMCAFSRTLPWSSVLRVWDMFFCEGVKIIFRVGLVLLKHALGSPEKVKACQGQYETIERLRSLSPKIMQEAFLVQEVQVLQPDGDP

SEQ ID NO: 98345 - protein, 210 aa, Homo sapiens
METWSVEQVCSWLVEKNLGELVHRFQEEEVSGAALLALNDRMVQQLVKKIGHQAVLMDLIKKYKQNTQGLKSPENPKKAALVMQTEAARDYRDEESSSPARHGEQMPSFYPAENLDNGLIDQRVLKQRNVKQILARSKALQWTKSYVLPEFPYDVKCMLAEQKCPDHSMRIRIIEFLQADMTKYLEGSLYPSTQQYNDVVNALLQAHPFL

SEQ ID NO: 98346 - protein, 31 aa, Homo sapiens
MSSFLPEGGCYELLTVIGKGFEDLMTVNLAR

SEQ ID NO: 98347 - protein, 97 aa, Homo sapiens
MLEKRSVGCRRCAVVGNSGNLRESSYGPEIDSHDFVLRMNKAPTAGFEADVGTKTTHHLVYPESFRELGDNVSMILVPFKTIDLEWVVSAITTGTIS

SEQ ID NO: 98348 - protein, 41 aa, Homo sapiens
MNIFDRKINFDALLKFSHITPSTQQHLKKVYASFALCMFVA

SEQ ID NO: 98349 - protein, 293 aa, Homo sapiens
MPTSSSFKHRIKEQEDYIRDWTAHREEIARISQDLALIAREINDVAGEIDSVTSSGTAPSTTLVDRVFDESLNFRKIPPLVHSKTPEGNNGRSGDPRPQAAEPPDHLTITRRRTWSRDEVMGDNLLLSSVFQFSKKIRQSIDKTAGKIRILFKDKDRNWDDIESKLRAESEVPIVKTSSMEISSILQELKRVEKQLQAINAMIDPDGTLEALNNMGFPSAMLPSPPKQKSSPVNNHHSPGQTPTLGQPEARALHPAAVSAAAEFENAESEADFSIHFNRFNPDGEEEDVTVQE

SEQ ID NO: 98350 - protein, 1174 aa, Homo sapiens
MEEMIPLDSAKESLGTQLQSMEDRMECESPEPHPLQDNGSFLWFSMMSQSMGGDNLSSLDTNEAEIEPENMREKFFRSLARLLENKSNNTKIFSKAKYCQLIKEVKEAKAKAKKESVDYRRLARFDVILVQGNEKLIEAVNGETDKIRYYLHSEDLFDILHNTHLSIGHGGRTRMEKELQAKYKNITKEVIMLYLTLCKPCQQKNSKLKKVLTSKSIKEVSSRCQVDLIDMQLNPDGEYRFILHYQDLCTKLTFLRSLKSKRPTEVAHALLDIFTIIGAPSVLQSDNGREFSSQVVSELSNIWPELKIVHGKSQTCQSQSSAEQTEDIRKRIFSWMQTNNSSHWTEFLWFIQMSQNQPYHRSMQQTPCESAFSSEAKLGLSHSQLTEELVASLHTENELDQADKELENTLRAQYEENIETGTDSSDIEENLSVTPKVAEKSPPESRLRFLSCVVCEKECTGVNSCISCDGNIHAICGVPSQHGTEGCGRQITCSLCYETSTMKRKHDEIQRSLPVKPSKMLKPSGTPFSPDKVGDWMAKQASLDFFVKKRHAFSEHSSSNKRNVNNRSYPEEGKTKRVHASFTRKYDPSYIEFGFVAVIDGEVLKPQCIICGDVLANEAMKPSKLKRHLYSKHKEISSQPKEFFERKSSELKSQPKQVFNVSHINISALRASYKVALPVAKSKTPYTIAETLVKDCIKEVCLEMLGESAAKKVAQVPLSNDTIARRIQELANDMEDQLIEQIKLAKYFSLQLDECRDIANMIILLVYVRFEHDDDIKEEFFFSASLPTNTTSSELYEAVKNYIVNKCGLEFKFCVGVCSDGAASMTGKHSEVVTQIKELAPECKTTHCFIHRESLAMKKISAELNSVLNDIVKIVNYIKSNSLNSRLFSLLCDNMEADHKQLLLHAEIRWLSRGKVLSRMFEIRNELLVFLQGKKPMWSQLFKDVNWTARLAYLSDIFSIFNDLNASMQGKNATYFSMADKVEGQKQKLEAWKNRISTDCYDMFHNLTTIINEVGNDLDIAHLRKVISEHLTNLLECFEFYFPSKEDPRIGNLWIQNPFLSSKDNLNLTVTLQDKLLKLATDEGLKISFENTASLPSFWIKAKNDYPELAEIALKLLLLFPSTYLCETGFSTLSVIKTKHRNSLNIHYPLRVALSSIQPRLDKLTSKKQAHLSH

SEQ ID NO: 98351 - protein, 221 aa, Homo sapiens
MFCLKAVSNLDEESRWTVHYTAPWHQQENVFLPTTRPPCVEDLHRQAKLNLKSVLRECDKLRHDGYRSSQYYSQGPTFAANASPFCDDYQDEDEETDQKCSLSSSEEERFISIRRPKTPASSDFSDLNTQTNWTKSLPLPTPEEKMRQQAQTVQADVVPINITASGTGQDDADGHSVYTPDHYSTLGRFNSCRSAGQRSETRDSSCQTEDVKVVPPSMRRI

SEQ ID NO: 98352 - protein, 797 aa, Homo sapiens
MSLWGLVSKMPPEKVQRLYVDFPQHLRHLLGDWLESQPWEFLVGSDAFCCNLASALLSDTVQHLQASVGEQGEGSTILQHISTLESIYQRDPLKLVATFRQILQGEKKAVMEQFRHLPMPFHWKQEELKFKTGLRRLQHRVGEIHLLREALQKGAEAGQVSLHSLIETPANGTGPSEALAMLLQETTGELEAAKALVLKRIQIWKRQQQLAGNGAPFEESLAPLQERCESLVDIYSQLQQEVGAAGGELEPKTRASLTGRLDEVLRTLVTSCFLVEKQPPQVLKTQTKFQAGVRFLLGLRFLGAPAKPPLVRADMVTEKQARELSVPQGPGAGAESTGEIINNTVPLENSIPGNCCSALFKNLLLKKIKRCERKGTESVTEEKCAVLFSASFTLGPGKLPIQLQALSLPLVVIVHGNQDNNAKATILWDNAFSEMDRVPFVVAERVPWEKMCETLNLKFMAEVGTNRGLLPEHFLFLAQKIFNDNSLSMEAFQHRSVSWSQFNKEILLGRGFTFWQWFDGVLDLTKRCLRSYWSDRLIIGFISKQYVTSLLLNEPDGTFLLRFSDSEIGGITIAHVIRGQDGSPQIENIQPFSAKDLSIRSLGDRIRDLAQLKNLYPKKPKDEAFRSHYKPEQMGKDGRGYVPATIKMTVERDQPLPTPELQMPTMVPSYDLGMAPDSSMSMQLGPDMVPQVYPPHSHSIPPYQGLSPEESVNVLSAFQEPHLQMPPSLGQMSLPFDQPHPQGLLPCQPQEHAVSSPDPLLCSDVTMVEDSCLSQPVTAFPQGTWIGEDIFPPLLPP

SEQ ID NO: 98353 - protein, 154 aa, Homo sapiens
MTPQSLLQTTLFLLSLLFLVQGAHGRGHREDFRFCSQRNQTHRSSLHYKPTPDLRISIENSEEALTVHAPFPAAHPASRSFPDPRGLYHFCLYWNRHAGRLHLLYGKRDFLLSDKASSLLCFQHQEESLAQGPPLLATSVTSWWSPQNISLPSA

SEQ ID NO: 98354 - protein, 283 aa, Homo sapiens
MADIIARLREDGIQKRVIQEGRGELPDFQDGTKATFHYRTLHSDDEGTVLDDSRARGKPMELIIGKKFKLPVWETIVCTMREGEIAQFLCDIKHVVLYPLVAKSLRNIAVGKDPLEGQRHCCGVAQMREHSSLGHADLDALQQNPQPLIFHMEMLKVESPGTYQQDPWAMTDEEKAKAVPLIHQEGNRLYREGHVKEAAAKYYDAIACLKNLQMKEQPGSPEWIQLDQQITPLLLNYCQCKLVVEEYYEVLDHCSSILNKQRQGLLQAGQGPRGRVECPGGPG

SEQ ID NO: 98355 - protein, 107 aa, Homo sapiens
MARRLLPAHVQSWMNRSGFAIPGVRDVQGCGRVLQPGRVVAPGLCPESLVPGGDAGELQHPGLTGDSLFQAKGHLPVRARRRPLDGGEWSSPRRTSRMGKLVWNHSF

SEQ ID NO: 98356 - protein, 114 aa, Homo sapiens
MSSSMWYIMQSIQSKYSLSERLIRTIAAIRSFPHDNVEDLIRGGADVNCTHGTLKPLHCACMVSDADCVELLLEKGAEVNALDGYNRTALHYAAEKDEACVEVLLEYGANPNAL

SEQ ID NO: 98357 - protein, 113 aa, Homo sapiens
MNIFDRKINFDALLKFSHITPSTQQHLKKVYASFALCMFVAAAGAYVHMVTHFIQAGLLSALGSLILMIWLMATPHSHETEQKRLGLLAGFAFLTGVGLGPALEFCIAVNPSP

SEQ ID NO: 98358 - protein, 1204 aa, Homo sapiens
MLTKFETKSARVKGLSFHPKRPWILTSLHNGVIQLWDYRMCTLIDKFDEHDGPVRGIDFHKQQPLFVSGGDDYKIKVWNYKLRRCLFTLLGHLDYIRTTFFHHEYPWILSASDDQTIRVWNWQSRTCVCVLTGHNHYVMCAQFHPTEDLVVSASLDQTVRVWDISGLRKKNLSPGAVESDVRGITGVDLFGTTDAVVKHVLEGHDRGVNWAAFHPTMPLIVSGADDRQVKIWRMNESKAWEVDTCRGHYNNVSCAVFHPRQELILSNSEDKSIRVWDMSKRTGVQTFRRDHDRFWVLAAHPNLNLFAAGHDGGMIVFKLERERPAYAVHGNMLHYVKDRFLRQLDFNSSKDVAVMQLRSGSKFPVFNMSYNPAENAVLLCTRASNLENSTYDLYTIPKDADSQNPDAPEGKRSSGLTAVWVARNRFAVLDRMHSLLIKNLKNEITKKVQVPNCDEIFYAGTGNLLLRDADSITLFDVQQKRTLASVKISKVKYVIWSADMSHVALLAKHAIVICNRKLDALCNIHENIRVKSGAWDESGVFIYTTSNHIKYAVTTGDHGIIRTLDLPIYVTRVKGNNVYCLDRECRPRVLTIDPTEFKFKLALINRKYDEVLHMVRNAKLVGQSIIAYLQKKGYPEVALHFVKDEKTRFSLALECGNIEIALEAAKALDDKNCWEKLGEVALLQGNHQIVEMCYQRTKNFDKLSFLYLITGNLEKLRKMMKIAEIRKDMSGHYQNALYLGDVSERVRILKNCGQKSLAYLTAATHGLDEEAESLKETFDPEKETIPDIDPNAKLLQPPAPIMPLDTNWPLLTVSKGFFEGTIASKGKGGALAADIDIDTVGTEGWGEDAELQLDEDGFVEATEGLGDDALGKGQEEGGGWDVEEDLELPPELDISPGAAGGAEDGFFVPPTKGTSPTQIWCNNSQLPVDHILAGSFETAMRTYARGRTTYQALPCLPSMYGYPNRNWKDAGLKNGVPAVGLKLNDLIQRLQLCYQLTTVGKFEEAVEKFRSILLSVPLLVVDNKQEIAEAQQLITICREYIVGLSVETERKKLPKETLEQQKRICEMAAYFTHSNLQPVHMILVLRTALNLFFKLKNFKTAATFARRLLELGPKPEVAQQTRKILSACEKNPTDAYQLNYDMHNPFDICAASYRPIYRGKPVEKCPLSGACYSPEFKGQICRVTTVTEIGKDVIGLRISPLQFR

SEQ ID NO: 98359 - protein, 141 aa, Homo sapiens
MKETNRRKSLHPIHQGITELSRSISVDLAESKRLGCLLLSSFQFSIQKLEPFLRDTKGFSLESFRAKASSLSEELKHFADGLETDGTLQKCFEDSNGKASDFSLEASVAEMKEYITKFSLERQTWDQLLLHYQQEAKEILS

SEQ ID NO: 98360 - protein, 79 aa, Homo sapiens
EEIQKMLPEEKVCKYCGVSYLILHEFKAMEEKVKAMEKEMKFYQGSVDREKRLQEKLHSLSQELEQYKIDNKSKTERIY

SEQ ID NO: 98361 - protein, 201 aa, Homo sapiens
MSEEIITPVYCTGVSAQVQKQRARELGLGRHENAIKYLGQDYEQLRVRCLQSGTLFRDEAFPPVPQSLGYKDLGPNSSKTYGIKWKRPTELLSNPQFIVDGATRTDICQGALGDCWLLAAIASLTLNDTLLHRVVPHGQSFQNGYAGIFHFQLWQFGEWVDVVVDDLLPIKDGKLVFVHSAEGNEFWSALLEKAYAKSPAF

SEQ ID NO: 98362 - protein, 207 aa, Homo sapiens
  MOD_RES (1)..(1): Any amino acid
XGQAMLAKASISTENFRPNFDVSIPLFSKDHPRTGGERGFLKFNTIPPLRKYMLVFKGKRYLTGIGSDTRNALYHVHNGEDVVLLTTCKHGKDWQKHKDSRCDRDNTEYEKYDYREMLHNATFCLVPRGRRLGSFRFLEALQAACVPVMLSNGWELPFSEVINWNQAAVIGDERLLLQTPISVGLVICYGGKHAERDSFYNQVYSSG

SEQ ID NO: 98363 - protein, 678 aa, Homo sapiens
MMEGLKKRTRKAFGIRKKEKDTDSTGSPDRDGIKKSNGAPNGFYAEIDWERYNSPELDEEGYSIRPEEPGSTKGKHFYSSSESEEEEESHKKFNIKIKPLQSKDILKNAATVDELKASIGNIALSPSPVGAIKRNLSSEEVARPRRSTPTPELISKKPPDDTTALAPLFGPPLESAFDEQKTEVLLDQPEIWGSGQPINPSMESPKLTRPFPTGTPPPLPPKNVPATPPRTGSPLTIGPGNDQSATEVKIEKLPSINDLDSIFGPVLSPKSVAVNAEEKWVHFSDTSPEHVTPELTPREKVVSPPATPDNPADSPAPGPLGPPGPTGPPGPPGPPRNVLSPLNLEEVQKKVAEQTFIKDDYLETISSPKDFGLGQRATPPPPPPPTYRTVVSSPGPGSGPGPGTTSGASSPARPATPLVPCRSTTPPPPPPRPPSRPKLPPGKPGVGDVSRPFSPPIHSSSPPPIAPLARAESTSSISSTNSLSAATTPTVENEQPSLVWFDRGKFYLTFEGSSRGPSPLTMGAQDTLPVAAAFTETVNAYFKGADPSKCIVKITGEMVLSFPAGITRHFANNPSPAALTFRVINFSRLEHVLPNPQLLCCDNTQNDANTKEFWVNMPNLMTHLKKVSEQKPQATYYNVDMLKYQENTWQITNEILCKDLEDSYNGELMYEKQILILV

SEQ ID NO: 98364 - protein, 153 aa, Homo sapiens
MLGFLSARQTGLEDPLRLRRAESTRRVLGLELNKDRDVERIHGGGINTLDIEPVEGRYMLSGGSDGVIVLYDLENSSRQSYYTCKAVCSIGRDHPDVHRYSVETVQWYPHDTGMFTSSSFDKTLKVWDTNTLQHSKQKLPSLPTNELRSKNRQ

SEQ ID NO: 98365 - protein, 78 aa, Homo sapiens
MLASPEPKGLVPFTKESFELIKQHIAKTHNEDHEEEDLKPTPDLEVGKKLPFIYGNLSQGMVSEPLEDVDPYYYKKKN

SEQ ID NO: 98366 - protein, 305 aa, Homo sapiens
MPKGRQKVPHLDAPLGLPTCLWLELAGLFLLVPWVMGLAGTGGPDGQGTGGPSWAVHLESLEGDGEEETLEQQADALAQAAGLVNAGRIGELQGHYLFVQPAGHRPALEVEAIRQQVEAVLAGHEAVRWHSEQRLLRRAKRSVHFNDPKYPQQWHLNNRRSPGRDINVTGVWERNVTGRGVTVVVVDDGVEHTIQDIAPNYSPEGSYDLNSNDPDPMPHPDVENGNHHGTRCAGEIAAVPNNSFCAVGVAYGSRIAGIRVLDGPLTDSMEAVAFNKHYQINDIYSCSWGPDDDGKTVDGPHQLGK

SEQ ID NO: 98367 - protein, 71 aa, Homo sapiens
MAPARLSRCPCLSVSVGSGDMDGLPKSSPGAVAGLSNAPGTPRDDGEMAAAGTFLHPFPSESYSPGMTMSV

SEQ ID NO: 98368 - protein, 522 aa, Homo sapiens
MQALDKRLVEVREALTRLRRRQVQQEAERRGAEQEAGLRLAKLTDLLQQEEQGREVACGALQKNQEDSSRRVDLEVARMQAQVTKLGEEVSLRFLKREAKLCGFLQKSFLALEKRMKASESSRLKLEGSLRGELESRWEKLRGLMEERLRALQGQHEESHLLEQCQGLDAAVAQLTKFVQQNQASLNRVLLAEEKAWDAKGRLEESRAGELAAYVQENLEAAQLAGELARQEMHGELVLLREKSRALEASVAQLAGQLKELSGHLPALSSRLDLQEQMLGLRLSEAKTEWEGAERKSLEDLARWRKEVTEHLRGVREKVDGLPQQIESVSDKCLLHKSDSDLRISAEGKAREFKVGALRQELATLLSSVQLLKEDNPGRKIAEMQGKLATFQNQIMKLENCVQANKTIQNLRFNTEARLRTQEMATLWESVLRLWSEEGPRTPLGSWKALPSLVRPRVFIKDMAPGKVVPMNCWGVYQAVRWLRWKASLIKLRALRRPGGVLEKPHSQEQVQQLTPSLFIQK

SEQ ID NO: 98369 - protein, 106 aa, Homo sapiens; identical to SEQ ID NO: 17170

SEQ ID NO: 98370 - protein, 54 aa, Homo sapiens
MLALLCSCLLLAAGASDAWTGEDSAEPNSDSAEWIRDMYAKVTEIWQEVMQRRD

SEQ ID NO: 98371 - protein, 163 aa, Homo sapiens
MSGPRAGFYRQELNKTVWEVPQRLQGLRPVGSGAYGSVCSAYDARLRQKVAVKKLSRPFQSLIHARRTYRELRLLKHLKHENVIGLLDVFTPATSIEDFSEVYLVTTLMGADLNNIVKCQALSDEHVQFLVYQLLRGLKYIHSAGIIHRVGPEAQQRGCERGL

SEQ ID NO: 98372 - protein, 304 aa, Homo sapiens
MSQPGQKPAASPRPRRAAAARRTHEHVSEKTSESPSKPGEKKGSDEKKAASLGSSQSSRTYAGGTASATKVSASSGATSKSSSMNPTETKAIPVSQQMEGPHLPNKKKHKKQAVKTEPEKKSQSTKPKSLPKQASDTGSNDAHNKKAVSRSAEQQPSEKSTEPKTKPQDMISAGGESVAGITAISGKPGDKKKEKKSLTPAVPVESKPDKPSGKSGMDAALDDLIDTLGGPEETEEENTTYTGPEVSDPMSSTYIEELGKREVTIPPKYRELLAKKEGITGPPADSSKPIGPDDAIDALSSDFT

SEQ ID NO: 98373 - protein, 246 aa, Homo sapiens
LSLLDIVLCLTVIPKVLAIFWFDLRSISFPACFLQVFIMNSFLTMESCTFMIMAYDRYVAICKPLQYSSIITDQFVARAAIFVVARNGLLTMPIPILSSRLRYCAGHIIKNCICTNVSVSKLSCDDITLNQSYQFVIGWTLLGSDLILIVLSYFFILKTVLRIKGEGDMAKALGTCGSHFILILFFTTVLLVLVITNLARKRIPPDVPILLNILHHLIPPALNPIVYGVRTKEIKQGIQNLLRRLC

SEQ ID NO: 98374 - protein, 194 aa, Homo sapiens
  MOD_RES (1)..(1): Any amino acid
XNNVNPVKTQHHSHPAKSLVEQFRGTDSDIPSSKDSEDSNEDEEEDDEEEDEEDDEDDESDDSQSGTSKRRRVTDERELRIPLEYGWQRETRIRNFGGRLQGEVAYYAPCGKKLRQYPEVIKYLSRNGIMDISRDNFSFSAKIRVGDFYEARDGPQGMQWCLLKEEDVIPRIRAMEGRRGRPPNPDRQRAREES

SEQ ID NO: 98375 - protein, 283 aa, Homo sapiens
MAQPGDGEASMSILERLLANAALRDEAGRLRSPEPRALPPTRGLLGWSQKDLQSEFGITGDPQPSSFSPSSWCQGASQDYGLGGASPRGDPGLGERDWTSKYGQGAGEGSTREWASRCGIGQEEMEASSSQDQSKVSAPGVLTAQDRVVGKPAQLGTQRSQEADVQDWEFRKRDSQGTYSSRDAELQDQEFGKRDSLGTYSSRDVSLGDWEFGKRDSLGAYASQDANEQGQDLGKRDHHGRYSSQDADEQDWEFQKRDVSLGTYGSRAAEPQEQEFGKSAWIR

SEQ ID NO: 98376 - protein, 285 aa, Homo sapiens
  MOD_RES (1)..(1): Any amino acid
XQSTLLGILLPLLLLVAALATALVFSYWWRRKQLVLPPNLNDLASLDQTAGATPLPILYSGSDYRSGLGHFGVVYHGEYIDQAQNRIQCAIKSLSRITEMQQVEAFLREGLLMRGLNHPNVLALIGIMLPPEGLPHVLLPYMCHGDLLQFIRSPQRNPTVKDLISFGLQVARGMEYLAEQKFVHRDLAARNCMLDESFTVKVADFGLARDILDREYYSVQQHRHARLPVKWMALESLQTYRFTTKSDVWSFGVLLWELLTRGAPPYRHIDPFDLTHFLAQGRRLP

SEQ ID NO: 98377 - protein, 140 aa, Homo sapiens
MKQILDSLQAYYRLRVCQEAVWEAYRIFLDRIPDTGEYQDWVSICQQETFCLFDIGKNFSNSQEHLDLLQQRIKQRSFPDRKDEISAEKTLGEPGETIVISTEKNKGKTKPFNILQFGNNHHEHLLPIFCLLSSIIYTYY

SEQ ID NO: 98378 - protein, 148 aa, Homo sapiens
MSETRWKRLWYEENMRHHQLHPVIKAFLCGSISGTCSTLLFQPLDLLKTRLQTLQPSDHGSRRVGMLAVLLKVVRTESLLGLWKGMSPSIVRCVPGVGIYFGTLYSLKQYFLRGHPPTALESVMLGVGSRSVAGVCMSPITVIKTRYE

SEQ ID NO: 98379 - protein, 175 aa, Homo sapiens
MASNHKSSAARPVSRGGVGLTGRPPSGIRPLSGNIRVATAMPPGTARPGSRGCPIGTGGVLSSQIKVAHRPVTQQGLTGMKTGTKGPQRQILDKSYYLGLLRSKISELTTEVNKLQKGIEMYNQENSVYLSYEKRAETLAVEIKELQGQLADYNMLVDKLNTNTEMEEVMNDYNM

SEQ ID NO: 98380 - protein, 505 aa, Homo sapiens
MWPSLLLLLLLPGPPPVAGLEDAAFPHLGESLQPLPRACPLRCSCPRVDTVDCDGLDLRVFPDNITRAAQHLSLQNNQLQELPYNELSRLSGLRTLNLHNNLISSEGLPDEAFESLTQLQHLCVAHNKLSVAPQFLPRSLRVADLAANQVMEIFPLTFGEKPALRSVYLHNNQLSNAGLPPDAFRGSEAIATLSLSNNQLSYLPPSLPPSLERLHLQNNLISKVPRGALSRQTQLRELYLQHNQLTDSGLDATTFSKLHSLEYLDLSHNQLTTVPAGLPRTLAILHLGRNRIRQVEAARLHGARGLRYLLLQHNQLGSSGLPAGALRPLRGLHTLHLYGNGLDRVPPALPRRLRALVLPHNHVAALGARDLVATPGLTELNLAYNRLASARVHHRAFRRLRALRSLDLAGNQLTRLPMGLPTGLRTLQLQRNQLRMLEPEPLAGLDQLRELSLAHNRLRVGDIGPGTWHELQALQVRHRLVSHTVPRAPPSPCLPCHVPNILVSW

SEQ ID NO: 98381 - protein, 280 aa, Homo sapiens
MAAEEPQQQKQEPLGSDSEGVNCLAYDEAIMAQQDRIQQEDMTDPCLLQIAVQNPLVSERLELSVLYKEYAEDDNIYQQKIKDLHKKYSYIRKTRPDGNCFYRAFGFSHLEALLDDSKELQRFKAVSAKSKEDLVSQGFTEFTIEDFHNTFMDLIEQVEKQTSVADLLASFNDQSTSDYLVVYLRLLTSGYLQRESKFFEHFIEGGRTVKEFCQQEVEPMCKESDHIHIIALAQALSVSIQVEYMDRGEGGTTNPHIFPEGSEPKVYLLYRPGHYDILYK

SEQ ID NO: 98382 - protein, 143 aa, Homo sapiens
MPRAGMGASLRPGTGPHPDTGDRKQIYNILSTLGLRPSTTDCDIVRRACESVSTRAAHMCSAGLAGVINRMRESRSEDVMRITVGVDGSVYKLHPSFKERFHASVRRLTPSCEITFIESEEGSGRGAALVSAVACKKACMLGQ

SEQ ID NO: 98383 - protein, 490 aa, Homo sapiens
MALKPHERKEKWERRLIKKPRESETCPPAEPSENRRPLEAGSPGQDLEPACDGARKVPLQPSKQVCSPEGGPLPASHWDQNGPAQRQQQLQPSQSSQPQGSLPAPSALPDPGQPCQPSQRPLLGQRSWPQRSLLGLKQPCQPRRSLLGPGQPCRPQRLLPSPDQLCQPQRSRPAQPCRPHWALPGPRQCCRRLRSLLTPCHHCRRLRSLLAPRSLLVPCLYCRRLRFLLAPRHRCRRLRSLLTLWHRCRPLRPWASPCHCGQPGRASSGQRSRPLWSLLAQCQRYQPPRPLLTLRPRRRPASFLPGQCCCPRRAFLAPCQYGQPRRSLLGQPSRPRRSLLRPRQPQRLVEAPEQPGPLTPSLLGPGRPRQQKQPLMGPEQPCPPKRPLMGPEQPCQPLRPLMGPNKPCKPQPLLPIPDRPSLLGQPGPPCRPLLGLLCQPRRSLLDLVPARQPRLSLLALGHPCRPLRSRWTRSCAPGMARQAPSVSPGA

SEQ ID NO: 98384 - protein, 204 aa, Homo sapiens
MLCEEAAQKRKGKEPGMALPQGRLTFRDVAIEFSLAEWKCLNPSQRALYREVMLENYRNLEAVDISSKRMMKEVLSTGQGNTEVIHTGTLQRYQSYHIGDFCFQEIEKEIHDIEFQCQEDERNGHEAPMTKIKKLTGSTDQHDHRHAGNKPIKDQLGSSFYSHLPELHIIQIKGWTAMVRSRVTTASASRVQAILLPQPTKIDF

SEQ ID NO: 98385 - protein, 824 aa, Homo sapiens
MSGPLEGADGGGDPRPGESFCPGGVPSPGPPQHRPCPGPSLADDTDANSNGSSGNESNGHESRGASQRSSHSSSSGNGKDSALLETTESSKSTNSQSPSPPSSSIAYSLLSASSEQDNPSTSGCSSEQSARARTQKELMTALRELKLRLPPERRGKGRSGTLATLQYALACVKQVQANQEYYQQWSLEEGEPCSMDMSTYTLEELEHITSEYTLQNQDTFSVAVSFLTGRIVYISEQAAVLLRCKRDVFRGTRFSELLAPQDVGVFYGSTAPSRLPTWGTGASAGSGLRDFTQEKSVFCRIRGGPDRDPGPRYQPFRLTPYVTKIRVSDGAPAQPCCLLIAERIHSGYEAPRIPPDKRIFTTRHTPSCLFQDVDERAAPLLGYLPQDLLGAPVLLFLHPEDRPLMLAIHKKILQLAGQPFDHSPIRFCARNGEYVTMDTSWAGFVHPWSRKVAFVLGRHKVRTAPLNEDVFTPPAPSPAPSLDTDIQELSEQIHRLLLQPVHSPSPTGLCGVGAVTSPGPLHSPGSSSDSNGGDAEGPGPPAPVTFQQICKDVHLVKHQGQQLFIESRARPQSRPRLPATGTFKAKALPCQSPDPELEAGSAPVQAPLALVPEEAERKEASSCSYQQINCLDSILRYLESCNLPSTTKRKCASSSSYTTSSASDDDRQRTGPVSVGTKKDPPSAALSGEGATPRKEPVVGGTLSPLALANKAESVVSVTSQCSFSSTIVHVGDKKPPESDIIMMEDLPGLAPGPAPSPAPSPTVAPDPAPDAYRPVGLTKAVLSLHTQKEEQAFLSRFRDLGRLRGLDSSSTAPSALGERGGGH

SEQ ID NO: 98386 - protein, 95 aa, Homo sapiens
MQPEEGTGWLLELLSEVQLQQYFLRLRDDLNVTRLSHFEYVKNEDLEKIGMGRPGQRRLWEAVKRRKALCKRKSWMSKVFSGKRLEAEFPPHHSQ

SEQ ID NO: 98387 - protein, 109 aa, Homo sapiens
ASPETSASPDGSQNLVYETELLRTQLNDSLKEIHQKELRIQQLNSNFSQLLEEKNTLSIQLCDTSQSLRENQQHYGDLLNHCAVLEKQVQELQAWRQGFTILARLVLNS

SEQ ID NO: 98388 - protein, 194 aa, Homo sapiens
IDDPNLVVKIGSKYYNWTTAAPLLLAMQAFQKPLPKSSCLSYLHVILDAIRFCFSKIFNAQIATVESIMRDKMPKKGGRWWFSWRGRNTTIKEESKPEQCLAGKAHSTGEQPPQLSLATRVKHESSSSDEERAAAKPSNAGHLPLLPNVSYKKTLRLTSEQLKSLKLKNGPNDVVFSVTTQYQGTCRCEGTIYL

SEQ ID NO: 98389 - protein, 630 aa, Homo sapiens
MPSLNVGKLLDKTAFHRSQTLSYRNGYAIVRRPTVGIGGDRLQFNQLSQAELDELASKAPVLTYGQPKQAPPADFIPAHVAFDKKVLKFDAYFQEDVPMSTEEQYRIRQVNIYYYLEDDSMSVIEPVVENSGILQGKLIKRQRLAKNDRGDHYHWKDLNRGINITIYGKTFRVVDCDQFTQVFLESQGIELNPPEKMALDPYTELRKQPLRKYVTPSDFDQLKQFLTFDKQVLRFYAIWDDTDSMYGECRTYIIHYYLMDDTVEIREVHERNDGRDPFPLLMNRQRVPKVLVENAKNFPQCVLEISDQEVLEWYTAKDFIVGKSLTILGRTFFIYDCDPFTRRYYKEKFGITDLPRIDVSKREPPPVKQELPPYNGFGLVEDSAQNCFALIPKAPKKDVIKMLVNDNKVLRYLAVLESPIPEDKDRRFVFSYFLATDMISIFEPPVRNSGIIGGKYLGRTKVVKPYSTVDNPVYYGPSDFFIGAVIEVFGHRFIILDTDEYVLKYMESNAAQYSPEALASIQNHVRKREAPAPEAESKQTEKDPGVQELEALIDTIQKQLKDHSCKDNIREAFQIYDKEASGYVDRDMFFKICESLNVPVDDSLVKELIRMCSHGEGKINYYNFVRAFSN

SEQ ID NO: 98390 - protein, 488 aa, Homo sapiens
IRKRHCFGTEVHNLDAKVDSGKTVKLNSPLEKINSFSPQKPPGHCSRCCCSTKQGNSQESSNTIKKDHTGKSKIPKIYFGTRTHKQIAQITRELRRTAYSGVPMTILSSRDHTCVHPEVVGNFNRNEKCMELLDGKNGKSCYFYHGVHKISDQHTLQTFQGMCKAWDIEELVSLGKKLKACPYYTARELIQDADIIFCPYNYLLDAQIRESMDLNLKEQVVILDEAHNIEDCARESASYSVTEVQLRFARDELDSMVNNNIRKKDHEPLRAVCCSLINWLEANAEYLVERDYESACKIWSGNEMLLTLHKMGITTATFPILQGHFSAVLQKEEKISPIYGKEEAREVPVISASTQIMLKGLFMVLDYLFRQNSRFADDYKIAIQQTYSWTNQIDISDKNGLLVLPKNKKRSRQKTAVHVLNFWCLNPAVAFSDINGKVQTIVLTSGTLSPMKSFSSELGVTFTIQLEANHIIKNSQSVPAEKCDYEQQ

SEQ ID NO: 98391 - protein, 73 aa, Homo sapiens
MPAVASVPKELYLSSSLKDLNKKTEVKPEKISTKSYVHSALKIFKTAEECRLDRDEERAYVLYMKYVTVYNLI

SEQ ID NO: 98392 - protein, 119 aa, Homo sapiens
MATRGGAGVAMAVWSLLSARAVTAFLLLFLPRFLQAQTFSFPFQQPEKCDNNQYFDISALSCVPCGANQRQDARGTSCVCLPGFQMISNNGGPAIICKKCPENMVLQKMAGTAFLALVT

SEQ ID NO: 98393 - protein, 82 aa, Homo sapiens
MDLLRELKAMPITLHLLQSTRVGMSVNALRKQSSDEEVIALAKSLIKSWKKLLDASDAKARERGRGMPLPTSSRDASEAPDP

SEQ ID NO: 98394 - protein, 74 aa, Homo sapiens
  MOD_RES (1)..(1): Any amino acid
XTYAVRRIRDAFRENKNVKDPVEIQTLVNKAKRDLGVIRRQITESRSVTQAGVQWRDLSNLHLPGSNHSSASAS

SEQ ID NO: 98395 - protein, 1697 aa, Homo sapiens
MSLLCVGVKKAKFDGAQEKFNTYVTLKVQNVKSTTIAVRGSQPSWEQDFMFEINRLDLGLTVEVWNKGLIWDTMVGTVWIPLRTIRQSNEEGPGEWLTLDSQVIMADSEICGTKDPTFHRILLDTRFELPLDIPEEEARYWAKKLEQLNAMRDQDEYSFQDEQDKPLPVPSNQCCNWNYFGWGEQHNDDPDSAVDDRDSDYRSETSNSIPPPYYTTSQPNASVHQYSVRPPPLGSRESYSDSMHSYEEFSEPQALSPTGSSRYASSGELSQGSSQLSEDFDPDEHSLQGSDMEDERDRDSYHSCHSSVSYHKDSPRWDQDEEELEEDLEDFLEEEELPEDEEELEEEEEEVPDDLGSYAQREDVAVAEPKDFKRISLPPAAPGKEDKAPVAPTEAPDMAKVAPKPATPDKVPAAEQIPEAEPPKDEESFRPREDEEGQEGQDSMSRAKANWLRAFNKVRMQLQEARGEGEMSKSLWFKGGPGGGLIIIDSMPDIRKRKPIPLVSDLAMSLVQSRKAGITSALASSTLNNEELKNHVYKKTLQALIYPISCTTPHNFEVWTATTPTYCYECEGLLWGIARQGMRCTECGVKCHEKCQDLLNADCLQRAAEKSSKHGAEDRTQNIIMVLKDRMKIRERNKPEIFELIQEIFAVTKTAHTQQMKAVKQSVLDGTSKWSAKISITVVCAQGLQAKDKTGSSDPYVTVQVGKTKKRTKTIYGNLNPVWEENFHFECHNSSDRIKVRVWDEDDDIKSRVKQRFKRESDDFLGQTIIEVRTLSGEMDVWYNLDKRTDKSAVSGAIRLHISVEIKGEEKVAPYHVQYTCLHENLFHFVTDVQNNGVVKIPDAKGDDAWKVYYDETAQEIVDEFAMRYGVESIYQAMTHFACLSSKYMCPGVPAVMSTLLANINAYYAHTTASTNVSASDRFAASNFGKERFVKLLDQLHNSLRIDLSMYRNNFPASSPERLQDLKSTVDLLTSITFFRMKVQELQSPPRASQVVKDCVKACLNSTYEYIFNNCHELYSREYQTDPAKKGEVLPEEQGPSIKNLDFWSKLITLIVSIIEEDKNSYTPCLNQFPQELNVGKISAEVMWNLFAQDMKYAMEEHDKHRLCKSADYMNLHFKVKWLYNEYVTELPAFKDRVPEYPAWFEPFVIQWLDENEEVSRDFLHGALERDKKDGFQQTSEHALFSCSVVDVFSQLNQSFEIIKKLECPDPQIVGHYMRRFAKTISNVLLQYADIISKDFASYCSKEKEKVPCILMNNTQQLRVQLEKMFEAMGGKELDAEASDILKELQVKLNNVLDELSRVFATSFQPHIEECVKQMGDILSQVKGTGNVPASACSSVAQDADNVLQPIMDLLDSNLTLFAKICEKTVLKRVLKELWKLVMNTMEKTIVLPPLTDQTGTQMIFNAAKELGQLSKLKDHMVREEAKSLTPKQCAVVELALDTIKQYFHAGGVGLKKTFLEKSPDLQSLRYALSLYTQATDLLIKTFVQTQSAQVHGGKGTRFTLSEDIYPEKGLGVEDPVGEVSVHVELFTHPGTGEHKVTVKVVAANDLKWQTSGIFRPFIEVNIIGPQLSDKKRKFATKSKNNSWAPKYNESFQFTLSADAGPECYELQVCVKDYCFAREDRTVGLAVLQLRELAQRGSAACWLPLGRRIHMDDTGLTVLRILSQRSNDEVAKEFVKLKSDTRSAEEGGAAPAP

SEQ ID NO: 98396 - protein, 25 aa, Homo sapiens
  MOD_RES (1)..(1): Any amino acid
XEHGTEAIFVAAVGIRPSHHAAAQS

SEQ ID NO: 98397 - protein, 84 aa, Homo sapiens
MLRAIAEERGRLSLRREVCGLGPHAAPGAEQAHRTGYEAQPHELARCPDLKVSVSLTVKWLLGGHTCGLGIVKALRGFHSVVQV

SEQ ID NO: 98398 - protein, 184 aa, Homo sapiens
  MOD_RES (1)..(1): Any amino acid
XPPLLDRARSRTPPSAPSQSRMTSERAPSPSSRMGQAPSQSLLPPAQDQPRSPVPSAFSDQSRCLIAQTTPVAGSQSLSSGAVATTTSSAGDHNGMLSVPAPGVPHSDVGEPPASTGAQQPSALAALQPAKERRSSSSSSSSSSSSSSSSSSSSSSSSSGSSSSDSEGSSLPVQPEVALKRGQN

SEQ ID NO: 98399 - protein, 69 aa, Homo sapiens
  MOD_RES (1)..(1): Any amino acid
XCCGQHNYTDWIKNKNKENSGQVPCSCTKSTLRKWFCDEPLNATYLEVFQVSLTVCFFKNIKNIIHAEM

SEQ ID NO: 98400 - protein, 263 aa, Homo sapiens
  MOD_RES (1)..(1): Any amino acid
XGRPLQNRDQMRANVINEIMSTERHYIKHLKDICEGYLKQCRKRRDMFSDEQLKVIFGNIEDIYRFQMGFVRDLEKQYNNDDPHLSEIGPCFLEHQDGFWIYSEYCNNHLDACMELSKLMKDSRYQHFFEACRLLQQMIDIAIDGFLLTPVQKICKYPLQLAELLKYTAQDHSDYRYVAAALAVMRNVTQQINERKRRLENIDKIAQWQASVLDWEGEDILDRSSELIYTGEMAWIYQPYGRNQQRVFFLFDHQMVLCKKQMC

SEQ ID NO: 98401 - protein, 295 aa, Homo sapiens
MGRGVRVLLLLSLLHCAGGSEGRKTWRRRGQQPPPPPRTEAAPAAGQPVESFPLDFTAVEGNMDSFMAQVKSLAQSLYPCSAQQLNEDLRLHLLLNTSVTCNDGSPAGYYLKESRGSRRWLLFLEGGWYCFNRENCDSRYDTMRRLMSSRDWPRTRTGTGILSSQPEENPYWWNANMVFIPYCSSDVWSGASSKSEKNEYAFMGALIIQEVVRELLGRGLSGAKVLLLAGSSAGGTGVLLNVDRVAEQLEKLGYPAIQVRGLADSGWFLDNKQYRHTDCVDTITCAPTEAIRRGI

SEQ ID NO: 98402 - protein, 46 aa, Homo sapiens
MGLSTQEAGKMTRVEGEGEYTDIQGLEWSGNFHFTAAPDLKLKLHM

SEQ ID NO: 98403 - protein, 166 aa, Homo sapiens
IPRSPQPLGGSHRTPSSRRDSDGANSVASYENEEPACEDADEDEDDYHNPGYLVVLPDSTPATSTAAPSAPALSTPGIRDSAFSMESIDDYVNVPESGESAEASLDGSREYVNVSQELHPGAAKTEPVEAESVLEPGLPGTAELGSWKWLWGPHMASCPCSSLTTA

SEQ ID NO: 98404 - protein, 147 aa, Homo sapiens
  MOD_RES (1)..(1): Any amino acid
XRDSTCSDTSPPAREEGMIERKRADSKQNGDANAVLSDEEGAGLTQPLASSPTPEERRALRRSTTRDRNKKAAACFLLSTGDYACADGSVRKGCGKSRSLNNIVGAAGTSLGLSPLASRYSLPYPLKKFLLTPFHPLTGPPPGHSAP

SEQ ID NO: 98405 - protein, 322 aa, Homo sapiens
MYRRIHEAIIQSPPIDYFDVFKESKEQNFYGSQESIIALCTHLQQLIRTIEDLDENQLKDEFFKLLQISLWGNKCDLSLSGGESSSQNTNVLNSLEDLKPFILLNDMEHLWSLLSNCKKTREKASATRVYIVLDNSGFELVTDLILADFLLSSELATEVHFYGKTIPWFVSDTTIHDFNWLIEQVKHSNHKWMSKCGADWEEYIKMGKWVYHNHIFWTLPHEYCAMPQVAPDLYAELQKAHLILFKGDLNYRKLTGDRKWEFSVPFHQALNGFHPAPLCTIRTLKAEIQVGLQPGQGEQLLASEPSWWTTGKYGIFQYDGPL

SEQ ID NO: 98406 - protein, 629 aa, Homo sapiens
MEFSIKQSPLSVQSVVKCIKMKQAPEILGSANGKTPSCEVNRECSVFLSKAQLSSSLQEGVMQKFNGHDALPFIPADKLKDLTSRVFNGEPGAHDAKLRFESQEMKGIGTPPNTTPIKNGSPEIKLKITKTYMNGKPLFESSICGDSAADVSQSEENGQKPENKARRNRKRSIKYDSLLEQGLVEAALVSKISSPSDKKIPAKKESCPNTGRDKDHLLKYNVGDLVWSKVSGYPWWPCMVSADPLLHSYTKLKGQKKSARQYHVQFFGDAPERAWIFEKSLVAFEGEGQFEKLCQESAKQAPTKAEKIKLLKPISGKLRAQWEMGIVQAEEAASMSVEERKAKFTFLYVGDQLHLNPQVAKEAGIAAESLGEMAESSGVSEEAAENPKSVREECIPMKRRRRAKLCSSAETLESHPDIGKSTPQKTAEADPRRGVGSPPGRKKTTVSMPRSRKGDAASQFLVFCQKHRDEVVAEHPDASGEEIEELLRSQWSLLSEKQRARYNTKFALVAPVQAEEDSGNVNGKKRNHTKRIQDPTEDAEAEDTPRKRLRTDKHSLRKRDTITDKTARTSSYKAMEAASSLKSQAATKNLSDACKPLKKRNRASTAASSALGFSKSSSPSASLTENEVQ

SEQ ID NO: 98407 - protein, 160 aa, Homo sapiens
MESTLSASNMQDPSSSPLEKCLGSANGNGDLDSEEGSSLEETGFNWGEYLEETGASAAPHTSFKHVEISIQSNFQPGMKLEVANKNNPDTYWVATIITTCGQLLLLRYCGYGEDRRADFWCDVVIADLHPVGWCTQNNKVLMPPDVESDVKPSASVQHIS

SEQ ID NO: 98408 - protein, 106 aa, Homo sapiens
MSFSATILFSPPSGSEARCCCCACKSETNGGNTGSQGGNPPPSTPITVTGHGLAVQSSEQLLHVIYQRVDKAVGLAEAALGLARANNELLKRLQEEVGDLRQGKVS

SEQ ID NO: 98409 - protein, 137 aa, Homo sapiens
MESTFVTQAGMQWGDLGLLQPLPPRFKGFSCLSLPSSPLHSSPLDLHQLRRVFGNCLPPFPPKYYLAMTTAMADERRDQLEQYLQNVTMDPNVLRSDVFVEFLKLAQLNTFDIATKKAYLDIFLPNEQSIRIEIITS

SEQ ID NO: 98410 - protein, 302 aa, Homo sapiens
MPRVKAAQAGRQSSAKRHLAEQFAVGEIITDMAKKEWKVGLPIGQGGFGCIYLADMNSSESVGSDAPCVVKVEPSDNGPLFTELKFYQRAAKPEQIQKWIRTRKLKYLGVPKYWGSGLHDKNGKSYRFMIMDRFGSDLQKIYEANAKRFSRKTVLQLSLRILDILEYIHEHEYVHGDIKASNLLLNYKNPDQVYLVDYGLAYRYCPEGVHKEYKEDPKRCHDGTIEFTSIDAHNGVAPSRRGDLEILGYCMIQWLTGHLPWEDNLKDPKYVRDSKIRYRENIASLMDKCFPEKNKPEAKERN

SEQ ID NO: 98411 - protein, 116 aa, Homo sapiens
MFPVAPKPQDSSQPSDRLMTEKQQEEAEWESINVLLMMHGLKPLSLVKRTDLKDLIIFDKQSSQRMRQNLKLLVEETSCQQNMIQELIETNQQLRNELQLEQSRAANQEQRANDLE

SEQ ID NO: 98412 - protein, 903 aa, Homo sapiens
VEDRKHFGAVEAKPELSLEVQLQAERDAIDRKEKEITNLEEQLEQFREELENKNEEVQQLHMQLEIQKKESTTRLQELEQENKLFKDDMEKLGLAIKESDAMSTQDQHVLFGKFAQIIQEKEVEIDQLNEQVTKLQQQLKITTDNKVIEEKNELIRDLETQIECLMSDQECVKRNREEEIEQLNEVIEKLQQELANIGQKTSMNAHSLSEEADSLKHQLDVVIAEKLALEQQVETANEEMTFMKNVLKETNFKMNQLTQELFSLKRERESVEKIQSIPENSVNVAIDHLSKDKPELEVVLTEDALKSLENQTYFKSFEENGKGSIINLETRLLQLESTVSAKDLELTQCYKQIKDMQEQGQFETEMLQKKIVNLQKIVEEKVAAALVSQIQLEAVQEYAKFCQDNQTISSEPERTNIQNLNQLREDELGSDISALTLRISELESQVVEMHTSLILEKEQVEIAEKNVLEKEKKLLELQKLLEGNEKKQREKEKKRSPQDVEVLKTTTELFHSNEESGFFNELEALRAESVATKAELASYKEKAEKLQEELLVKETNMTSLQKDLSQVRDHLAEAKEKLSILEKEDETESECSSEEVTEIISQFTEKIEKMQELHAAEILDMESRHISETETLKREHYVAVQLLKEECGTLKAVIQCLRSKEGSSIPELAHSDAYQTREICSSDSGSDWGQGIYLTHSQGFDIASEGRGEESESATDSFPKKIKGLLRAVHNEGMQVLSLTESPYSDGEDHSIQQVSEPWLEERKAYINTISSLKDLITKMQLQREAEVYDSSQSHESFSDWRGELLLALQQVFLEERSVLLAAFRTELTALGTTDAVGLLNCLEQRIQEQGVEYQAAMECLQKADRRSLLSEIQALHAQMNGRKITLKREQESEKPSQGSHCH

SEQ ID NO: 98413 - protein, 560 aa, Homo sapiens
MAKFLAELLGCTLPSKGASPMFESKSHSRVGLKSSTKQKTTIFSTLASEKSLSDCKKEQQWKPSMYSSITPVCFPSPLIEKPIGKESMPQTPPFSAMFDSSGYNRNLYQSAEDSCGGLYYHDNNLLSGSLEALIQHLVPNVDYYPDRTYIFTFLLSSRLFMHPYELMAKVCHLCVEHQRLSDPDSDKNQMRKIAPKILQLLTEWTETFPYDFRDERMMRNLKDLAHRIASGEEQTYRKNVQQMMQCLIRKLAALSQYEEVLAKISSTSTDRLTVLKTKPQSIQRDIITVCNDPYTLAQQLTHIELERLNYIGPEEFVQAFVQKDPLDNDKSCYSERKKTRNLEAYVEWFNRLSYLVATEICMPVKKKHRARMIEYFIDVARECFNIGNFNSLMAIISGMNMSPVSRLKKTWAKVKTAKFDILEHQMDPSSNFYNYRTALRGAAQRSLTAHSSREKIVIPFFSLLIKDIYFLNEGCANRLPNGHVNFEKFWELAKQVSEFMTWKQVECPFERDRKILQYLLTVPVFSEDALYLASYESEGPENHIEKDRWKSLRSSLLGRV

SEQ ID NO: 98414 - protein, 3681 aa, Homo sapiens
MSEVSSDEREDVQKKTFTKWVNAQFSKFGKQHIENLFSDLQDGRRLLDLLEGLTGQKLPKEKGSTRVHALNNVNKALRVLQNNNVDLVNIGSTDIVDGNHKLTLGLIWNIILHWQVKNVMKNIMAGLQQTNSEKILLSWVRQSTRNYPQVNVINFTTSWSDGLALNALIHSHRPDLFDWNSVVCQQSATQRLEHAFNIARYQLGIEKLLDPEDVDTTYPDKKSILMYITSLFQVLPQQVSIEAIQEVEMLPRPPKVTKEEHFQLHHQMHYSQQITVSLAQGYERTSSPKPRFKSYAYTQAAYVTTSDPTRSPFPSQHLEAPEDKSFGSSLMESEVNLDRYQTALEEVLSWLLSAEDTLQAQGEISNDVEVVKDQFHTHEGYMMDLTAHQGRVGNILQLGSKLIGTGKLSEDEETEVQEQMNLLNSRWECLRVASMEKQSNLHRVLMDLQNQKLKELNDWLTKTEERTRKMEEEPLGPDLEDLKRQVQQHKVLQEDLEQEQVRVNSLTHMVVVVDESSGDHATAALEEQLKVLGDRWANICRWTEDRWVLLQDILLKWQRLTEEQCLFSAWLSEKEDAVNKIHTTGFKDQNEMLSSLQKLAVLKADLEKKKQSMGKLYSLKQDLLSTLKNKSVTQKTEAWLDNFARCWDNLVQKLEKSTAQISQAVTTTQPSLTQTTVMETVTTVTTREQILVKHAQEELPPPPPQKKRQITVDSEIRKRLDVDITELHSWITRSEAVLQSPEFAIFRKEGNFSDLKEKVNAIEREKAEKFRKLQDASRSAQALVEQMVNEGVNADSIKQASEQLNSRWIEFCQLLSERLNWLEYQNNIIAFYNQLQQLEQMTTTAENWLKIQPTTPSEPTAIKSQLKICKDEVNRLSDLQPQIERLKIQSIALKEKGQGPMFLDADFVAFTNHFKQVFSDVQAREKELQTIFDTLPPMRYQETMSAIRTWVQQSETKLSIPQLSVTDYEIMEQRLGELQALQSSLQEQQSGLYYLSTTVKEMSKKAPSEISRKYQSEFEEIEGRWKKLSSQLVEHCQKLEEQMNKLRKIQNHIQTLKKWMAEVDVFLKEEWPALGDSEILKKQLKQCRLLVSDIQTIQPSLNSVNEGGQKIKNEAEPEFASRLETELKELNTQWDHMCQQVYARKEALKGGLEKTVSLQKDLSEMHEWMTQAEEEYLERDFEYKTPDELQKAVEEMKRAKEEAQQKEAKVKLLTESVNSVIAQAPPVAQEALKKELETLTTNYQWLCTRLNGKCKTLEEVWACWHELLSYLEKANKWLNEVEFKLKTTENIPGGAEEISEVLDSLENLMRHSEDNPNQIRILAQTLTDGGVMDELINEELETFNSRWRELHEEAVRRQKLLEQSIQSAQETEKSLHLIQESLTFIDKQLAAYIADKVDAAQMPQEAQKIQSDLTSHEISLEEMKKHNQGKEAAQRVLSQIDVAQKKLQDVSMKFRLFQKPANFEQRLQESKMILDEVKMHLPALETKSVEQEVVQSQLNHCVNLYKSLSEVKSEVEMVIKTGRQIVQKKQTENPKELDERVTALKLHYNELGAKVTERKQQLEKCLKLSRKMRKEMNVLTEWLAATDMELTKRSAVEGMPSNLDSEVAWGKATQKEIEKQKVHLKSITEVGEALKTVLGKKETLVEDKLSLLNSNWIAVTSRAEEWLNLLLEYQKHMETFDQNVDHITKWIIQADTLLDESEKKKPQQKEDVLKRLKAELNDIRPKVDSTRDQAANLMANRGDHCRKLVEPQISELNHRFAAISHRIKTGKASIPLKELEQFNSDIQKLLEPLEAEIQQGVNLKEEDFNKDMNEDNEGTVKELLQRGDNLQQRITDERKREEIKIKQQLLQTKHNALKDLRSQRRKKALEISHQWYQYKRQADDLLKCLDDIEKKLASLPEPRDERKIKEIDRELQKKKEELNAVRRQAEGLSEDGAAMAVEPTQIQLSKRWREIESKFAQFRRLNFAQIHTVREETMMVMTEDMPLEISYVPSTYLTEITHVSQALLEVEQLLNAPDLCAKDFEDLFKQEESLKNIKDSLQQSSGRIDIIHSKKTAALQSATPVERVKLQEALSQLDFQWEKVNKMYKDRQGRFDRSVEKWRRFHYDIKIFNQWLTEAEQFLRKTQIPENWEHAKYKWYLKELQDGIGQRQTVVRTLNATGEEIIQQSSKTDASILQEKLGSLNLRWQEVCKQLSDRKKRLEEQKNILSEFQRDLNEFVLWLEEADNIASIPLEPGKEQQLKEKLEQVKLLVEELPLRQGILKQLNETGGPVLVSAPISPEEQDKLENKLKQTNLQWIKVSRALPEKQGEIEAQIKDLGQLEKKLEDLEEQLNHLLLWLSPIRNQLEIYNQPNQEGPFDVKETEIAVQAKQPDVEEILSKGQHLYKEKPATQPVKRKLEDLSSEWKAVNRLLQELRAKQPDLAPGLTTIGASPTQTVTLVTQPVVTKETAISKLEMPSSLMLEVPALADFNRAWTELTDWLSLLDQVIKSQRVMVGDLEDINEMIIKQKATMQDLEQRRPQLEELITAAQNLKNKTSNQEARTIITDRIERIQNQWDEVQEHLQNRRQQLNEMLKDSTQWLEAKEEAEQVLGQARAKLESWKEGPYTVDAIQKKITETKQLAKDLRQWQTNVDVANDLALKLLRDYSADDTRKVHMITENINASWRSIHKRVSEREAALEETHRLLQQFPLDLEKFLAWLTEAETTANVLQDATRKERLLEDSKGVKELMKQWQDLQGEIEAHTDVYHNLDENSQKILRSLEGSDDAVLLQRRLDNMNFKWSELRKKSLNIRSHLEASSDQWKRLHLSLQELLVWLQLKDDELSRQAPIGGDFPAVQKQNDVHRAFKRELKTKEPVIMSTLETVRIFLTEQPLEGLEKLYQEPRELPPEERAQNVTRLLRKQAEEVNTEWEKLNLHSADWQRKIDETLERLRELQEATDELDLKLRQAEVIKGSWQPVGDLLIDSLQDHLEKVKALRGEIAPLKENVSHVNDLARQLTTLGIQLSPYNLSTLEDLNTRWKLLQVAVEDRVRQLHEAHRDFGPASQHFLSTSVQGPWERAISPNKVPYYINHETQTTCWDHPKMTELYQSLADLNNVRFSAYRTAMKLRRLQKALCLDLLSLSAACDALDQHNLKQNDQPMDILQIINCLTTIYDRLEQEHNNLVNVPLCVDMCLNWLLNVYDTGRTGRIRVLSFKTGIISLCKAHLEDKYRYLFKQVASSTGFCDQRRLGLLLHDSIQIPRQLGEVASFGGSNIEPSVRSCFQFANNKPEIEAALFLDWMRLEPQSMVWLPVLHRVAAAETAKHQAKCNICKECPIIGFRYRSLKHFNYDICQSCFFSGRVAKGHKMHYPMVEYCTPTTSGEDVRDFAKVLKNKFRTKRYFAKHPRMGYLPVQTVLEGDNMETPVTLINFWPVDSAPASSPQLSHDDTHSRIEHYASRLAEMENSNGSYLNDSISPNESIDDEHLLIQHYCQSLNQDSPLSQPRSPAQILISLESEERGELERILADLEEENRNLQAEYDRLKQQHEHKGLSPLPSPPEMMPTSPQSPRDAELIAEAKLLRQHKGRLEARMQILEDHNKQLESQLHRLRQLLEQPQAEAKVNGTTVSSPSTSLQRSDSSQPMLLRVVGSQTSDSMGEEDLLSPPQDTSTGLEEVMEQLNNSFPSSRGRNTPGKPMREDTM

SEQ ID NO: 98415 - protein, 143 aa, Homo sapiens
MTDSKPITKSKSEANLIPSQEPFPASDNSGETPQRNGEGHTLPKTPSQAEPASHKGPKDAGRRRNSLPPSHQKPPRNPLSSSDAAPSPELQANGTGTQGLEATDTNGLSSSARPQGQQAGSPSKEDKKQANIKRQLMTNFILG

SEQ ID NO: 98416 - protein, 305 aa, Homo sapiens
QMMNLLTGGQKLCADCHVLIWLCGVLWPSHRKFSAPRHGSLGFLPRKRSSRHRGKVKSFPKDDPSKPVHLTAFLGYKAGMTHIVREVDRPGSKVNKKEVVEAVTIVETPPMVVVGIVGYVETPRGLRTFKTVFAEHISDECKRRFYKNWHKSKKKAFTKYCKKWQDEDGKKQLEKDFSSMKKYCQVIRVIAHTQMRLLPLRQKKAHLMEIQVNGGTVAEKLDWARERLEQQVPVNQVFGQDEMIDVIGVTKGKGYKGVTSRWHTKKLPRKTHRGLRKVACIGAWHPARVAFSVARAGQKGYHHRT

SEQ ID NO: 98417 - protein, 179 aa, Homo sapiens
MVPREAPESAQCLCPSLTIPNAKDVLRKRHKRRSRQHQRFMARKALLQEQGLLSMPPEPGSSPLPTPFGAATATEAASSGKQCLRAGSGSAPCSRRPAPGKASGPLPSKCVAIDCEMVGTGPRGRVSELARCSIVSYHGNVLYDKYIRPEMPIADYRTRWSGITRQHMRKAVPFQVAQK

SEQ ID NO: 98418 - protein, 36 aa, Homo sapiens
MSTGFSFGSGTLGSTTVAAGGTSTGGVFSFGTGASR

SEQ ID NO: 98419 - protein, 378 aa, Homo sapiens
MAMLPPPGPQSFVHFTKQSLALIEQRIAERKSKEPKEEKKDDDEEAPKPSSDLEAGKQLPFIYGDIPPGMVSEPLEDLDPYYADKKTFIVLNKGKTIFRFNATPALYMLSPFSPLRRISIKILVHSLFSMLIMCTILTNCIFMTMNNPPDWTKNVEYTFTGIYTFESLVKILARGFCVGEFTFLRDPWNWLDFVVIVFAYLTEFVNLGNVSALRTFRVLRALKTISVIPGLKTIVGALIQSVKKLSDVMILTVFCLSVFALIGLQLFMGNLKHKCFRNSLENNETLESIMNTLESEEDFRKYFYYLEGSKDALLCGFSTDSGQCPEGYTCVKIGRNPDYGYTSFDTFSWAFLALFRLMTQDYWENLYQQTLRAAGKTY

SEQ ID NO: 98420 - protein, 148 aa, Homo sapiens
MPKRKAAGQGDMRQEPKRRSARLSAMLVPVTPEVKPKRTSSSRKMKTKSDMMEENIDTSAQAVAETKQEAVVEEDYNENAKNGEAKITEAPASEKEIVEVKEENIEDATEKGGEKKEAVAAEVKNEEEDQKEDEEDQNEEKGEAGKED

SEQ ID NO: 98421 - protein, 125 aa, Homo sapiens
GLSVLIVAIHILELLIDEAAMPRGMQGTSLGQVSFSKLGSFGAVIQVVLIFYLMVSSVVGFYSSPLFRSLRPRWHDTAMTQIIGNCVCLLVLSSALPVFSRTLGLDRLPLPVSGFPQASRKTQHQ

SEQ ID NO: 98422 - protein, 18 aa, Homo sapiens
MSGFNFGGTGAPTGGFTF

SEQ ID NO: 98423 - protein, 105 aa, Homo sapiens
MGKDYYKILGIPSGANEDEIKKAYRKMALKYHPDKNKEPNAEEKFKEIAEAYDVLSDPKKRGLYDQYGEEAAAPLGPSVALTQMTWMWMKMRTHLALSAVLASMG

SEQ ID NO: 98424 - protein, 565 aa, Homo sapiens
MVNPTLGVHEADLLKTSGTLISFIYPAQNPELLNKLSQRKTTVLAMDQVPRVTIAQGYDALSSMANIAGYKAVVLAANHFGRFFTGQITAAGKVPPAKILIVGGGVAGLASAGAAKSMGAIVRGFDTRAAALEQFKSLGAEPLEVDLKESGEGQGGYAKEMSKEFIEAEMKLFAQQCKEVDILISTALIPGKKAPVLFNKEMIESMKEGSVVVDLAAEAGGNFETTKPGELYIHKGITHIGYTDLPSRMATQASTLYSNNITKLLKAISPDKDNFYFDVKDDFDFGTMGHVIRGTVVMKDGKVIFPAPTPKNIPQGAPVKQKTVAELEAEKAATITPFRKTMSTASAYTAGLTGILGLGIAAPNLAFSQMVTTFGLAGIVGYHTVWGVTPALHSPLMSVTNAISGLTAVGGLALMGGHLYPSTTSQGLAALAAFISSVNIAGGFLVTQRMLDMFKRPTDPPEYNYLYLLPAGTFVGGYLAALYSGYNIEQIMYLGSGLCCVGALAGLSTQGTARLGNALGMIGVAGGLAATLGVLKPGPELLAQMSGAMALGGTIGKHLWASAFM

SEQ ID NO: 98425 - protein, 63 aa, Homo sapiens
MESNLSGLVPAAGLVPALPPAVTLGLTAAYTTLYALLFFSVYAQLWLVLLYGHKRLSYQTVFL

SEQ ID NO: 98426 - protein, 571 aa, Homo sapiens
MPYLGSEDVVKELKKALCNPHIQADRLRYRNVIQRVIRMSKLDQWGQAEVLNFLLRYQPRSEEELFDILNLLDSFLKSSSPGVVMGATKLFLILAKMFPHVQTDVLVRVKGPLLAACSSESRELCFVALCHVRQILHSLPGHFSSHYKKFFCSYSEPHYIKLQKVEVLCELVNDENVQQVLEELRGYCTDVSADFAQAAIFAIGGIARTYTDQCVQILTELLGLRQEHITTVVVQTFRDLVWLCPQCTEAVCQALPGCEENIQDSEGKQALIWLLGVHGERIPNAPYVLEDFVENVKSETFPAVKMELLTALLRLFLSRPAECQDMLGRLLYYCIEEEKDMAVRDRGLFYYRLLLVGIDEVKRILCSPKSDPTLGLLEDPAERPVNSWASDFNTLVPVYGKAHWATISKCQGAERCDPELPKTSSFAASGPLIPEENKERVQELPDSGALMLVPNRQLTADYFEKTWLSLKVAHQQVLPWRGEFHPDTLQMALQVVNIQTIAMSRAGSRPWKAYLSAQDDTGCLFLTELLLEPGNSEMQISVKQNEARTETLNSFISVLETVIGTIEEIKS

SEQ ID NO: 98427 - protein, 75 aa, Homo sapiens
MGIPSPSAAPKKTSFGSLKDEDRIFTNLYGRHDWRLKGSLSRGDWYKTKEILLKGPDWILGEIKTSGLRGRGGAG

SEQ ID NO: 98428 - protein, 173 aa, Homo sapiens
MMSSKPTSHAEVNETIPNPYPPSSFMAPGFQQPLGSINLENQAQGAQRAQPYGITSPGIFASSQPGQGNIQMINPSVGTAVMNFKEEAKALGFIISGSLSVSASKELSRCLVKGSLGMNIVSSILAFIGVILLLVDMCINGVAGQDYWAVLSGKGISATLMIFSLLEFFVACA

SEQ ID NO: 98429 - protein, 42 aa, Homo sapiens
  MOD_RES (1)..(1): Any amino acid
XASRPDATCASPAKFKGQHIRDTDAFRSCKFPTKRSKKAGRH

SEQ ID NO: 98430 - protein, 194 aa, Homo sapiens
  MOD_RES (1)..(1): Any amino acid
XPHNNLMRPHTLNSTSMSKAYQSTFTGETNTPYSKQFVHSKSSQYRRLRTEWKNNVYLARSRIQGLGLYAAKDLEKHTMVIEYIGTIIRNEVANRREKIYEEQNRGIYMFRINNEHVIDATLTGGPARYINHSCAPNCVAEVVTFDKEDKIIIISSRRIPKGEELTYDYQFDFEDDQHKIPCHCGAWNCRKWMN

SEQ ID NO: 98431 - protein, 162 aa, Homo sapiens
  MOD_RES (1)..(1): Any amino acid
XFNEINARKIHGERNVFEGIFNNAIFCTIVLGTFVVQLISTIPTSRLKFLKEAGHGTQKEEIPEEELAEDVEEIDHAERELRRGQILWFRGLNRIQTQIRVVNAFRSSLYEGLEKPESRSSIHNFMTHPEFRIEDSEPHIPLIDDTDAEDDAPTKRNSSPPP

SEQ ID NO: 98432 - protein, 456 aa, Homo sapiens
  MOD_RES (1)..(1): Any amino acid
XQETVKVQIHSRASEYITDVHSNDLSTPQILPSNEGVNPRLSASPPKSGNLWPGLAPPHKKAQSASPKRKKQHKKYRSVISDIFDGTIISSVQCLTCDRVSVTLETFQDLSLPIPGKEDLAKLHSSSHPTSIVKAGSCGEAYAPQGWIAFFMEYVKRFVVSCVPSWFWGPVVTLQDCLAAFFARDELKGDNMYSCEKCKKLRNGVKFCKVQNFPEILCIHLKRFRHELMFSTKISTHVSFPLEGLDLQPFLAKDSPAQIVTYDLLSVICHHGTASSGHYIAYCRNNLNNLWYEFDDQSVTEVSESTVQNAEAYVLFYRKSSEEAQKERRRISNLLNIMEPSLLQFYISRQWLNKFKTFAEPGPISNNDFLCIHGGVPPRKAGYIEDLVLMLPQNIWDNLYSRYGGGPAVNHLYICHTCQIEAEKIEKRRKTELEIFIRILQVLLTILRLQSLNVVM

SEQ ID NO: 98433 - protein, 62 aa, Homo sapiens
MAEGNTLISVDYEIFGKVQGVFFRKHTQEMTVENRIAETHSKSCVPVSFATSYAGINEFKRI

SEQ ID NO: 98434 - protein, 81 aa, Homo sapiens
MAHGIPSQGKVTITVDEYSSNPTQAFTHYNINQSRFQPPHVHMVDPIPYDTPKPAGHTRFVCISDTHSRTDGIQMPYGDIL

SEQ ID NO: 98435 - protein, 21 aa, Homo sapiens
  MOD_RES (1)..(1): Any amino acid
XTTDSWGKFQFGAGTQVVVTP

SEQ ID NO: 98436 - protein, 66 aa, Homo sapiens
MAAADGDDSLYPIAVLIDELRNEDVQRRGFTMLARLGRELLTSSDPPASASQSVGITGVSHRAQPG

SEQ ID NO: 98437 - protein, 197 aa, Homo sapiens
IWPSEEVLAYYCLKHNNIFRALAVCELGGGMTCLAGLMVAISADVKEVLLTDGNEKAIRNVQDIITRNQKAGVFKTQKISSCVLRWDNETDVSQLEGHFDIVMCADCLFLDQYRASLVDAIKRLLQPRGKAMVFAPRRGNTLNQFCNLAEKAGFCIQRHENYDEHISNFHSKLKKENPDIYEENLHYPLLLILTKHG

SEQ ID NO: 98438 - protein, 380 aa, Homo sapiens
  MOD_RES (1)..(1): Any amino acid
XEEGISLFSSLLNNKHFLIVFVHALEQQKDFAVRDRCSLASLLTIALHGKLEYYTSIMKELLVDLIDASAAKNPKLMLRRTESVVEKMLTNWMSICMYSCLRETVGEPFFLLLCAIKQQINKGSIDAITGKARYTLSEEWLLRENIEAKPRNLNVSFQGCGMDSLSVRAMDTDTLTQVKEKILEAFCKNVPYSQWPRAEDVDLEWFASSTQSYILRDLDDTSVVEDGRKKLNTLAHYKIPEGASLAMSLIDKKDNTLGRVKDLDTEKYFHLVLPTDELAEPKKSHRQSHRKKVLPEIYLTRLLSTKGTLQKFLDDLFKAILSIREDKPPLAVKYFFDFLEEQAEKRGISDPDTLHIWKTNRWRPSSPVLGEHPEEPPVCL

SEQ ID NO: 98439 - protein, 210 aa, Homo sapiens
MAAPRRGRGSSTVLSSVPLQMLFYLSGTYYALYFLATLLMITYKSQVFSYPHRYLVLDLALLFLMGILEAVRLYLGTRGNLTEAERPLAASLALTAGTALLSAHFLLWQALVLWADWALSATLLALHGLEAVLQVVAIAAFTSGHGELQDSPEDPLHTPAPERLGPPPSPAPALAEDQLGTPAIWRTQPTNHADQGRTPSLKLETCCLHG

SEQ ID NO: 98440 - protein, 850 aa, Homo sapiens
MIFWSFVAGVVTFYCSLGPDSLLPNIFFTIKYKPKQLGLQELFPQGHSCAVCGKVKCKRHRPSLLLENYQPWLDLKISSKVDASLSEVDIPSIITKKLLKAAMKHIEVIVKARQKVKNTEFLQQAALEEYGPELHVALRSRRDELHYLRKLTELLFPYILPPKATDCRSLTLLIREILSGSVFLPSLDFLADPDTVNHLLIIFIDDSPPEKATEPASPLVPFLQKFAEPRNKKPSVLKLELKQIREQQDLLFRFMNFLKQEGAVHVLQFCLTVEEFNDRILRPELSNDEMLSLHEELQKIYKTYCLDESIDKIRFDPFIVEEIQRIAEGPYIDVVKLQTMRCLFEAYEHVLSLLENVFTPMFCHSDEYFRQLLRGAESPTRNSKLNRGSLSLDDFRNTQKRGESFGISRIGSKIKGVFKSTTMEGAMLPNYGVAEGEDDFIEEGIVVMEDDSPVEAVSTPNTPRNLAAWKISIPYVDFFEDPSSERKEKKERIPVFCIDVERNDRRAVGHEPEHWSVYRRYLEFYVLESKLTEFHGAFPDAQLPSKRIIGPKNYEFLKSKREEFQEYLQKLLQHPELSNSQLLADFLSPNGGETQFLDKILPDVNLGKIIKSVPGKLMKEKGQHLEPFIMNFINSCESPKPKPSRPELTILSPTSENNKKLFNDLFKNNANRAENTERKQNQNYFMEVMTVEGVYDYLMYVGRVVFQVPDWLHHLLMGTRILFKNTLEMYTDYYLQCKLEQLFQEHRLVSLITLLRDAIFCENTEPRSLQDKQKGAKQTFEEMMNYIPDLLVKCIGEETKYESIRLLFDGLQQPVLNKQLTYVLLDIVIQELFPELNKVQKEVTSVTSWM

SEQ ID NO: 98441 - protein, 720 aa, Homo sapiens
EKENKRLQERCGLYKSELEILKEKLRQLKEENNNGKEKLRIMAVKNSEVMAQLTESRQSILKLESELENKDEILRDKFSLMNENRELKVRVAAQNERLDLCQQEIESSRVELRSLEKIISQLPLKRELFGFKSYLSKYQMSSFSNKEDRCIGCCEANKLVISELRIKLAIKEAEIQKLHANLTANQLSQSLITCNDSQESSKLSSLETEPVKLGGHQVESVKDQNQHTMNKQYEKERQRLVTGIEELRTKLIQIEAENSDLKVNMAHRTSQFQLIQEELLEKASNSSKLESEMTKKCSQLLTLEKQLEEKIVAYSSIAAKNAELEQELMLEAQLEKKDQQFKEQEKTMSMLQQDIICKQHHLESLDRLLTESKGEMKKENMKKDEALKALQNQVSEETIKVRQLDSALEICKEELVLHLNQLEGNKEKFEKQLKKKSEEVYCLQKELKIKNHSLQETSEQNVILQHTLQQQQQMLQQETIRNGELEDTQTKLEKQVSKLEQELQKQRESSAEKLRKMEEKCESAAHEADLKRQKVIELTGTARQVKIEMDQYKEELSKMEKEIMHLKRDGENKAMHLSQLDMILDQTKTELEKKTNAVKELEKLQHSTETELTEALQKREVLETELQNAHGELKSTLRQLQELRDVLQKAQLSLEEKYTTIKDLTAELRECKMEIEDKKQELLEMDQALKERNWELKQRAAQVTHLDMTIREHRGEMEQK

SEQ ID NO: 98442 - protein, 188 aa, Homo sapiens
MGLCKCPKRKVTNLFCFEHRVNVCEHCLVANHAKCIVQSYLQWLQDSDYNPNCRLCNIPLASRETTRLVCYDLFHWACLNERAAQLPRNTAPAGYQCPSCNGPIFPPTNLAGPVASALREKLATVNWARAGLGLPLIDEVVSPEPEPLNTSDFSDWSSFNASSTPGPEEVDSASAAPAFYSQAPRPPA

SEQ ID NO: 98443 - protein, 118 aa, Homo sapiens
MSCQKAVLELNIGSQLGPKSPERTEGVTAFEDYGTGLLENQLSVGDFVKIQKAFEVISSDTGSTVSFWMIDTGQKIKQFTGCHGNAEISTMALDANETRLLTGSTDGTVKIWDFNGYC

SEQ ID NO: 98444 - protein, 11 aa, Homo sapiens
MTTSALRRQVK

SEQ ID NO: 98445 - protein, 182 aa, Homo sapiens
MKKVLLEMEDQKNSYEQKAKESLQKVLEEKMNAEQQLQSTQRSLALAEQKCEEWRSQYEALKEDWRTLGTQHRELESQLHVLQSKLQGADSRDLQMNQALRFLENEHQQLQAKIECLQGDRDLCSLDTQDLQDQLKRSEAEKLTLVTRVQQLQGLLQNQSLQLQEQEKLLTKKGQQIYYHKF

SEQ ID NO: 98446 - protein, 107 aa, Homo sapiens
MGRVSSAAGSGDPRPPPWLRLHTTQLYQHVPETRWPIVYSPRYNITFMGLEKLHPFDAGKWGKVINFLKEEKLLSDSMLVEAREASEEDLLVVHTRRYLNELKWSFA

SEQ ID NO: 98447 - protein, 352 aa, Homo sapiens
MARHGLPLLPLLSLLVGAWLKLGNGQATSMVQLQGGRFLMGTNSPDSRDGDGPVREATVKPFAIDIFPVTNKDFRDFVREKKYRTEAEMFGWSFVFEDFVSDELRNKATQPMKSVLWWLPVEKAFWRQPAGPGSGIRERLEHPVLHVSWNDARAYCAWRGKRLPTEEEWEFAARGGLKGQVYPWGNWFQPNRTNLWQGKFPKGDKAEDGFHGVSPVNAFPAQNNYGLYDLLGNVWEWTASPYQAAEQDMRVLRGASWIDTADGSANHRARVTTRVLLCCPGWSAVAQSQLTTASNCQALAILPPQLLKYLGLQDGQHSRFSLRQPRFPLCCRRRPAARGAVSSRVVTRRKAF

SEQ ID NO: 98448 - protein, 1040 aa, Homo sapiens
MVSSAQMGFNLQALLEQLSQDELSKFKYLITTFSLAHELQKIPHKEVDKADGKQLVEILTTHCDSYWVEMASLQVFEKMHRMDLSERAKDEVREAALKSFNKRKPLSLGITRKERPPLDVDEMLERFKTEAQDKDNRCRYILKTKFREMWKSWPGDSKEVQVMAERYKMLIPFSNPRVLPGPFSYTVVLYGPAGLGKTTLAQKLMLDWAEDNLIHKFKYAFYLSCRELSRLGPCSFAELVFRDWPELQDDIPHILAQARKILFVIDGFDELGAAPGALIEDICGDWEKKKPVPVLLGSLLNRVMLPKAALLVTTRPRALRDLRILAEEPIYIRVEGFLEEDRRAYFLRHFGDEDQAMRAFELMRSNAALFQLGSAPAVCWIVCTTLKLQMEKGEDPVPTCLTRTGLFLRFLCSRFPQGAQLRGALRTLSLLAAQGLWAQTSVLHREDLERLGVQESDLRLFLDGDILRQDRVSKGCYSFIHLSFQQFLTALFYTLEKEEEEDRDGHAWDIGDVQKLLSGVERLRNPDLIQAGYYSFGLANEKRAKELEATFGCRMSPDIKQELLRCDISCKGGHSTVTDLQELLGCLYESQEEELVKEVMAQFKEISLHLNAVDVVPSSFCVKHCRNLQKMSLQVIKENLPENVTASESDAEVERSQDDQHMLPFWTDLCSIFGSNKDLMGLAINDSFLSASLVRILCEQIASDTCHLQRVVFKNISPADAHRNLCLALRGHKTVTYLTLQGNDQDDMFPALCEVLRHPECNLRYLGLVSCSATTQQWADLSLALEVNQSLTCVNLSDNELLDEGAKLLYTTLRHPKCFLQRLSLENCHLTEANCKDLAAVLVVSRELTHLCLAKNPIGNTGVKFLCEGLRYPECKLQTLVLWNCDITSDGCCDLTKLLQEKSSLLCLDLGLNHIGVKGMKFLCEALRKPLCNLRCLWLWGCSIPPFSCEDLCSALSCNQSLVTLDLGQNPLGSSGVKMLFETLTCSSGTLRTLRLKIDDFNDELNKLLEEIEEKNPQLIIDTEKHHPWAERPSSHDFMI

SEQ ID NO: 98449 - protein, 410 aa, Homo sapiens
MEFVKCLGHPEEFYNLVRFRIGGKRKDSLSSSLKTCYKYLNQTSRSFAAVIQALDGEMRNAVCIFYLVLRALDTLEDDMTISVEKKVPLLHNFHSFLYQPDWRFMESKEKDRQVLEDFPTISLEFRNLAEKYQTVIADICRRMGIGMAEFLDKHVTSEQEWDKYCHYVAGLVGIGLSRLFSASEFEDPLVGEDTERANSMGLFLQKTNIIRDYLEDQQGGREFWPQEVWSRYVKKLGDFAKPENIDLAVQCLNELITNALHHIPDVITYLSRLRNQSVFNFCAIPQVMAIATLAACYNNQQVFKGAVKIRKGQAVTLMMDATNMPAVKAIIYQYMEEIYHRIPDSDPSSSKTRQIISTIRTQNLPNCQLISRSHYSPIYLSFVMLLAALSWQYLTTLSQVTEDYVQTGEH

SEQ ID NO: 98450 - protein, 71 aa, Homo sapiens
MALSQGLFTFKDVAIEFSQEEWECLDPAQRALYRDVMLENYRNLLSLDEDNIPPEDGSHLAACGQSTLPLP

SEQ ID NO: 98451 - protein, 151 aa, Homo sapiens
  MOD_RES (1)..(1): Any amino acid
XMPFGKGWFAGRNLAVSQVTTKYVLWVDDDFVFTARTRLERLVDVLERTPLDLARLEATSLSLQVGGAVREISGFATTYRQLLSVEPGAPGLGNCLRQRRGFHHELVGFPGCVVTDGVVNFFLARTDKVREVGFDPRLSRVAHLEFFLDGL

SEQ ID NO: 98452 - protein, 19 aa, Homo sapiens
  MOD_RES (1)..(1): Any amino acid
XSNDYKLSFGAGTTVTVRA

SEQ ID NO: 98453 - protein, 1407 aa, Homo sapiens
MATRRTGLSEGDGDKLKACEVSKNKDGKEQSETVSLSEDETFSWPGPKTVTLKRTSQGFGFTLRHFIVYPPESAIQFSYKDEENGNRGGKQRNRLEPMDTIFVKQVKEGGPAFEAGLCTGDRIIKVNGESVIGKTYSQVIALIQNSDTTLELSVMPKDEDILQVAYSQDAYLKGNEAYSGNARNIPEPPPICYPWLPSAPSAMAQPVEISPPDSSLSKQQTSTPVLTQPGRAYRMEIQVPPSPTDVAKSNTAVCVCNESVRTVIVPSEKVVDLLSNRNNHTGPSHRTEEVRYGVSEQTSLKTVSRTTSPPLSIPTTHLIHQPAGSRSLEPSGILLKSGNYSGHSDGISSSRSQAVEAPSVSVNHYSPNSHQHIDWKNYKTYKEYIDNRRLHIGCRTIQERLDSLRAASQSTTDYNQVVPNRTTLQGRRRSTSHDRVPQSVQIRQRSVSQERLEDSVLMKYCPRSASQGALTSPSVSFSNHRTRSWDYIEGQDETLENVNSGTPIPDSNGEKKQTYKWSGFTEQDDRRGICERPRQQEIHKSFRGSNFTVAPSVVNSDNRRMSGRGVGSVSHWRKGIPSIMRKTFEKKPTATGTFGVRLDDCPPAHTNRYIPLIVDICCKLVEERGLEYTGIYRVPGNNAAISSMQEELNKGMADIDIQDDKWRDLNVISSLLKSFFRKLPEPLFTNDKYADFIEANRKEDPLDRLKTLKRLIHDLPEHHYETLKFLSAHLKTVAENSEKNKMEPRNLAIVFGPTLVRTSEDNMTHMVTHMPDQYKIVETLIQHHDWFFTEEGAEEPLTTVQEESTVDSQPVPNIDHLLTNIGRTGVSPGDVSDSATSDSTKSKGSWGSGKDQYSRELLVSSIFAAASRKRKKPKEKAQPSSSEDELDNVFFKKENVEQCHNDTKEESKKESETLGRKQKIIIAKENSTRKDPSTTKDEKISLGKESTPSEEPSPPHNSKHNKSPTLSCRFAILKESPRSLLAQKSSHLEETGSDSGTLLSTSSQASLARFSMKKSTSPETKHSEFLANVSTITSDYSTTSSATYLTSLDSSRLSPEVQSVAESKGDEADDERSELISEGRPVETDSESEFPVFPTALTSERLFRGKLQEVTKSSRRNSEGSELSCTEGSLTSSLDSRRQLFSSHKLIECDTLSRKKSARFKSDSGSLGDAKNEKEAPSLTKVFDVMKKGKSTGSLLTPTRGESEKQEPTWKTKIADRLKLRPRAPADDMFGVGNHKVNAETAKRKSIRRRHTLGGHRDATEISVLNFWKVHEQSGERESELSAVNRLKPKCSAQDLSISDWLARERLRTSTSDLSRGEIGDPQTENPSTREIATTDTPLSLHCNTGSSSSTLASTNRPLLSIPPQSPDQINGESFQNVSKNASSAANAQPHKLSETPGSKAEFHPCL

SEQ ID NO: 98454 - protein, 139 aa, Homo sapiens
MDMRWHCENLQTTDDILVASAECPSDDEDIDPCEPSSANPTRAGGREPYPGSAEVIRESSSTTGMVVGIVAAAALCILILLYAMYKYRNRDEGSYHVDESRNYISNSAQSNGAVVKEKQPSSAKSSNKNKKNKDKEYYV

SEQ ID NO: 98455 - protein, 85 aa, Homo sapiens
MAVSLDDDVPLILTLDEGGSAPLAPSNGLGQEELPSKNGGSYAIHDSQAPSLSSGGESSPSSPAHNWEMNYQEAAIYLQEGENND

SEQ ID NO: 98456 - protein, 61 aa, Homo sapiens
MAPVVTGKFGERPPPKRLTREAMRNYLKERGDQTVLILHAKVAQKSYGNEKRDGVSLCRPG

SEQ ID NO: 98457 - protein, 102 aa, Homo sapiens
MADEALFLLLHNEMVSGVYKSAEQGEENGRCITKLENMGFRVGQGLIERFTKDTARFKDELDIMKFICKDFWTTVFKKQIDNLRTNHQYLAFTCGLIRGGLS

SEQ ID NO: 98458 - protein, 138 aa, Homo sapiens
  MOD_RES (1)..(1): Any amino acid
XKPLGPPPPSYTCFRCGKPGHYIKNCPTNGDKNFESGPRIKKSTGIPRSFMMEVKDPNMKGAMLTNTGKYAIPTIDAEAYAIGKKEKPPFLPEEPSSSSEEDDPIPDELLCLICKDIMTDAVVIPCCGNSYCDECKKC

SEQ ID NO: 98459 - protein, 359 aa, Homo sapiens
MPLVKRNIEPRHLCRGALPEGITSELECVTNSTLAAIIRQLSSLSKHAEDIFGELFNEANNFYIRANSLQDRIDRLAVKVTQLDSTVEEVSLQDINMKKAFKSSTVQDQQVVSKNSIPNPVADIYNQSDKPPPLNILTPYRDDKKDGLKFYTDPSYFFDLWKEKMLQDTEDKRKEKRRQKREKHKLNPNRNQQVNVRKVRTRKEEWERRKMGIEFMSDAKKLEQAGSAKEDRVPSGSHASDVTDYSYPATPNHSLHPQPVTPSYAAGDVPPHGPASQAAEHEYRPPSASARHMALNRPQQPPPPPPPQAPEGSQASAPMAPADYGMLPAQIIEYYNPSGPPPPPPPPVIPSAQTAFVSP

SEQ ID NO: 98460 - protein, 84 aa, Homo sapiens
MMTSVSSDHCRGAREKPQISAAQSTQPQKQVVQMESPSVAQAGVQWCHLSSQQPPPPGFKRFSCLSLSSSWDYRQQLNRCVSLK

SEQ ID NO: 98461 - protein, 398 aa, Homo sapiens
DPDQAASYTVEPDPRSRHLALSGPTFGIIVKHFPKLLPKVLVQGTVFARMAPEQKTELVCELQKLQYCVGMCGDGANDCGALKAADVGISLSQAEASVVSPFTSSMASIECVPMVIREGRCSLDTSFSVFKYMALYSLTQFISVLILYTINTNLGDLQFLAIDLVITTTVAVLMSRTGPALVLGRVRPPGALLSVPVLSSLLLQMVLVTGVQLGGYFLTLAQPWFVPLNRTVAAPDNLPNYENTVVFSLSSFQYLILAAAVSKGAPFRRPLYTNERARPVPPRLPAPPPAQAGLQEALQAAGTRAGRAALAAAARRPPEVVQAHGHPRHWNSLPLSHQLDPSPATPPPPPPTSLRLATVYTPPPRPPPPWGSVDYCPLPWTIPRRGGSPQLPSVLLSV

SEQ ID NO: 98462 - protein, 8 aa, Homo sapiens
MDVAIEFS

SEQ ID NO: 98463 - protein, 96 aa, Homo sapiens
MFPPSGSTGLIPPSHFQARPLSTLPRMAPTWLSDIPLVQPPGHQDVSERRLDTQRPQVTMWERDVSSDRQEPGRRGRSWGLEGSQALSQQAEVIVR

SEQ ID NO: 98464 - protein, 401 aa, Homo sapiens
MELKEEFQEAKAWVGESFHLNVSGEASLFEVNIRYIGGLLSAFYLTGEEVFRIKAIRLGEKLLPAFNTPTGIPKGVVSFKSGNWGWATAGSSSILAEFGSLHLEFLHLTELSGNQVFAEKVRNIRKVLRKIEKPFGLYPNFLSPVSGNWVQHHVSVGGLGDSFYEYLIKSWLMSGKTDMEAKNMYYEALEAIETYLLNVSPGGLTYIAEWRGGILDHKMGHLACFSGGMIALGAEDAKEEKRAHYRELAAQITKTCHESYARSDTKLGPEAFWFNSGREAVATQLSESYYILRPEVVESYMYLWRQTHNPIYREWGWEVVLALEKYCRTEAGFSGIQDVYSSTPNHDNKQQSFFLAETLKYLYLLFSEDDLLSLEDWVFNTEAHPLPVNHSDSSGRAWGRH

SEQ ID NO: 98465 - protein, 489 aa, Homo sapiens
MLWTPAPPDLTLGEGEEARTWDFLTAVGGSQAEAQACLTEALQLQARGALYTAHAQAWAQLWVECGLDVVGPLQLRQALRGSLYYLLSALPQPKAPGYICHGLSPGGLSNGSREECYWGHVFWDQDLWMFPSILMFHPEAARAILEYRIRTLDGALENAQNLGYQGAKFAWESADSGLEVCPEDIYGVQEVHVNGAVVLAFELYYHTTQDLQLFREAGGWDVVRAVAEFWCSRVEWSPREEKYHLRGVMSPDEYHSGVNNSVYTNVLVQNRKNLEIYEAVTSPQGPAMTWSMFAVGWMELKDAVRARGLLDRSFANMAEPFKVWTENADGSGAVNFLTGMGGFLQAVVFGCTGFRVTRAGVTFDPVCLSGISRVSVSGIFYQGNKLNFSFSEDSVTVEVTARAGPWAPHLEAELWPSQSRLSLLPGHKVSFPRSAGRIQMSPPKLPGSSSSEFPGRTFSDVRDPLQSPLWVTLGSSSPTESLTVDPASE

SEQ ID NO: 98466 - protein, 151 aa, Homo sapiens
  MOD_RES (1)..(1): Any amino acid
XNSKTHWNKTIHGLIYNALKLFMEMNQKLFDDCTQQFKAEKLKEKLKMKEREEAWVKIENLAKANPQYTVYSQASTMSIPVAMETDGPLFEDVQMLRKTVKDEAHQGLALIPRLECSGTILAHCSLGLLDSSNPPTSASQAAVTTGTTTLS

SEQ ID NO: 98467 - protein, 259 aa, Homo sapiens
MIANDVTGPWCPDLESRCEKFLQKDIFEIGAFNWEIMESLKCSDLEGSDFRADWECEGQFERQVNEECYFKQVNVTYGHMPVFQHHTSHTVRQSRETGEKLMECHECGKAFSRGSHLIQHQKIHTGEKPFGCKECGKAFSRASHLVQHQRIHTGEKPYDCKDCGKAFGRTSELILHQRLHTGVKPYECKECGKTFRQHSQLILHQRTHTGEKPYVCKDCGKAFIRGSQLTVHRRIHTGARPYECKECGKAFRQHSQLTV

SEQ ID NO: 98468 - protein, 1676 aa, Homo sapiens
MSLLCVGVKKAKFDGAQEKFNTYVTLKVQNVKSTTIAVRGSQPSWEQDFMFEINRLDLGLTVEVWNKGLIWDTMVGTVWIPLRTIRQSNEEGPGEWLTLDSQVIMADSEICGTKDPTFHRILLDTRFELPLDIPEEEARYWAKKLEQLNAMRDQDEYSFQDEQDKPLPVPSNQCCNWNYFGWGEQHNDDPDSAVDDRDSDYRSETSNSIPPPYYTTSQPNASVHQYSVRPPPLGSRESYSDSMHSYEEFSEPQALSPTGSSRYASSGELSQGSSQLSEDFDPDEHSLQGSDMEDERDRDSYHSCHSSVSYHKDSPRWDQDEEELEEDLEDFLEEEELPEDEEELEEEEEEVPDDLGSYAQREDVAVAEPKDFKRISLPPAAPGKEDKAPVAPTEAPDMAKVAPKPATPDKVPAAEQIPEAEPPKDEESFRPREDEEGQEGQDSMSRAKANWLRAFNKVRMQLQEARGEGEMSKSLWFKGGPGGGLIIIDSMPDIRKRKPIPLVSDLSLVQSRKAGITSALASSTLNNEELKNHVYKKTLQALIYPISCTTPHNFEVWTATTPTYCYECEGLLWGIARQGMRCTECGVKCHEKCQDLLNADCLQRAAEKSSKHGAEDRTQNIIMVLKDRMKIRERNKPEIFELIQEIFAVTKTAHTQQMKAVKQSVLDGTSKWSAKISITVVCAQGLQAKDKTGSSDPYVTVQVGKTKKRTKTIYGNLNPVWEENFHFECHNSSDRIKVRVWDEDDDIKSRVKQRFKRESDDFLGQTIIEVRTLSGEMDVWYNLDKRTDKSAVSGAIRLHISVEIKGEEKVAPYHVQYTCLHENLFHFVTDVQNNGVVKIPDAKGDDAWKVYYDETAQEIVDEFAMRYGVESIYQAMTHFACLSSKYMCPGVPAVMSTLLANINAYYAHTTASTNVSASDRFAASNFGKERFVKLLDQLHNSLRIDLSMYRNNFPASSPERLQDLKSTVDLLTSITFFRMKVQELQSPPRASQVVKDCVKACLNSTYEYIFNNCHELYSREYQTDPAKKGEVLPEEQGPSIKNLDFWSKLITLIVSIIEEDKNSYTPCLNQFPQELNVGKISAEVMWNLFAQDMKYAMEEHDKHRLCKSADYMNLHFKVKWLYNEYVTELPAFKDRVPEYPAWFEPFVIQWLDENEEVSRDFLHGALERDKKDGFQQTSEHALFSCSVVDVFSQLNQSFEIIKKLECPDPQIVGHYMRRFAKTISNVLLQYADIISKDFASYCSKEKEKVPCILMNNTQQLRVQLEKMFEAMGGKELDAEASDILKELQVKLNNVLDELSRVFATSFQPHIEECVKQMGDILSQVKGTGNVPASACSSVAQDADNVLQPIMDLLDSNLTLFAKICEKTVLKRVLKELWKLVMNTMEKTIVLPPLTDQTGTQMIFNAAKELGQLSKLKDHMVREEAKSLTPKQCAVVELALDTIKQYFHAGGVGLKKTFLEKSPDLQSLRYALSLYTQATDLLIKTFVQTQSAQGLGVEDPVGEVSVHVELFTHPGTGEHKVTVKVVAANDLKWQTSGIFRPFIEVNIIGPQLSDKKRKFATKSKNNSWAPKYNESFQFTLSADAGPECYELQVCVKDYCFAREDRTVGLAVLQLRELAQRGSAACWLPLGRRIHMDDTGLTVLRILSQRSNDEVAKEFVKLKSDTRSAEEGGAAPAP

SEQ ID NO: 98469 - protein, 19 aa, Homo sapiens
MSFVRVNRCGPRVGVRKTP

SEQ ID NO: 98470 - protein, 238 aa, Homo sapiens
MGEKVSEAPEPVPRGCSGHGSRTPASALVAASSPGASSAESSSGSETLSEEGEPGGFSREHQPPPPPPLGGTLGARAPAAWAPASVLLERGVLALPPPLPGGAVPPAPRGSSASQEEQDEELDHILSPPPMPFRKCSNPDVASGPGKSLKYKRQLSEDGRQLRRGSLGGALTGRYLLPNPVAGQAWPASAETSNLVRMRSQALGQSAPSLTASLKELSLPRRGSFPVCPNAGRTSPLG

SEQ ID NO: 98471 - protein, 135 aa, Homo sapiens
MRRVSPGRAAHKTAWCILPSEQLMQLYSARQRRRLNRGLRRKQHSLLKRLRKAKKEAPPMEKPEVVKTHLRDMIILPEMVGSMVGVYNGKTFNQVEIKPEMIGHYLGEFSITYKPVKHGRPGIGATHSSRFIPLK

SEQ ID NO: 98472 - protein, 149 aa, Homo sapiens
MKMFESADSTATRSGQDLWAEICSCLPNPEQEDGANNAFSDSFVDSCPEGEGQREVADFAVQPAVKPWAPLQDSEVYLASLEKKLRRIKGLNQEVTSKDMLRTLAQAKKECWDRFLQEKLASEFFVDGLDSDESFLRNGICAKGFGQAS

SEQ ID NO: 98473 - protein, 105 aa, Homo sapiens
  MOD_RES (1)..(1): Any amino acid
XGEDVDLFDMKQFKNSFKKILQRALKNVTVSFRETEENAVWIRIAWGTQYTKPNQYKPTYVVYYSQTPYAFTSSSMLRRNTPLLGQALTIASKHHQIVKMDLRSR

SEQ ID NO: 98474 - protein, 106 aa, Homo sapiens
LFPGSSQARHVNHSATEALGELRERAPGQGTNGFQLLRHAVKRDLLPPRTPPYQGTHSVAQAGVQWHCYRLLQPLPPGLKCSSHLSLPNTWDHRHAPLHTASFFRC

SEQ ID NO: 98475 - protein, 607 aa, Homo sapiens
MRFLRTDSASADPDNLKYSSSRDRGGSSSYGLQPSNSAVVSRQRHDDTRVHADIQNDEKGGYSVNGGSGENTYGRKSLGQELRVNNVTSPEFTSVQHGSRALATKDMRKSQERSMSYSDESRLSNLLRRITREDDRDRRLATVKQLKEFIQQPENKLVLVKQLDNILAAVHDVLNESSKLLQELRQEGACCLGLLCASLSYEAEKIFKWIFSKFSSSAKDEVKLLYLCATYKALETVGEKKAFSSVMQLVMTSLQSILENVDTPELLCKCVKCILLVARCYPHIFSTNFRDTVDILVGWHIDHTQKPSLTQQVSGWLQSLEPFWVADLAFSTTLLGQFLEDMEAYAEDLSHVASGESVDEDVPPPSVSLPKLAALLRVFSTVVRSIGERFSPIRGPPITEAYVTDVLYRVMRCVTAANQVFFSEAVLTAANECVGVLLGSLDPSMTIHCDMVITYGLDQLENCQTCGTDYIISVLNLLTLIVEQINTKLPSSFVEKLFIPSSKLLFLRYHKEKEVVAVAHAVYQAVLSLKNIPVLETAYKLILGEMTCALNNLLHSLQLPEACSEIKHEAFKNHVFNVDNAKFVVIFDLSALTTIGNAKNSLIGVSL

SEQ ID NO: 98476 - protein, 36 aa, Homo sapiens
MADPRDKALQDYRKKLLEHKEIDGRLKECECTFLSI

SEQ ID NO: 98477 - protein, 181 aa, Homo sapiens
MPSRTGPKMEGSGGRVRLKAHYGGDIFITSVDAATTFEELCEEVRDMCRLHQQHPLTLKWVDSEVFPSTPEQPGLPCPGEDKSIYRRGARRWRKLYRANGHLFQAKRFNRRAYCGQCSERIWGLARQGYRCINCKLLVHKRCHGLVPLTCRKHMDSVMPSQEPPVDDKNEDADLPSEETDG

SEQ ID NO: 98478 - protein, 86 aa, Homo sapiens
MGKMVSVINTVDTSHEDMIHDAQMDYYGTRLATCSSDRSVKIFDVRNGGQILIADLRGHEGPVWQVAWAHPMYGNILASCSYDRKV

SEQ ID NO: 98479 - protein, 68 aa, Homo sapiens
MSEVLPADSGVDTLAVFMASSGTTDVTNRNSPATPPNTLNLRSSHNELLNAEIKHTETKNSTPPKCRK

SEQ ID NO: 98480 - protein, 127 aa, Homo sapiens
MLQFVRAGARAWLRPTGSQGLSSLAEEAARATENPEQVASEGLPEPVLRKVELPVPTHRRPVQAWVESLRGFEQERVGLADLHPDVFATAPRLDILHQVAMWQKNFKRIEVLPMAPGAPQVTTTCCP

SEQ ID NO: 98481 - protein, 143 aa, Homo sapiens
MGWTSLCSGRGVGVEGAWRDGGRGCTDWRSEETQSPSRSTGQDVAAEWGSEESVAESLEAEFEKAAEEVRHLKTKPSDEEMLFIYGHYKQATVGDINTERPGMLDFTGKAKWDAWNELKGTSKEDAMKAYINKVEELKKKYGI

SEQ ID NO: 98482 - protein, 41 aa, Homo sapiens
VICSDKTGTLTTNQMSVCKGLPLTSGQEPLPFTEFCGRLHP

SEQ ID NO: 98483 - protein, 152 aa, Homo sapiens
  MOD_RES (1)..(1): Any amino acid
XEPWKVCVNVHSFKPEELMVKTKDGYVEVSGKHEEKQQEGGIVSKNFTKKIQEHNTTGSKLKQTRDEGTSKQADKIVTGVGGCGHLKKYHRGSLYCHLFLIFSDRIYINSFFPFLNSIIFNYIRHFVTGKPENPKTQKKMKIIHIPSFQRRL

SEQ ID NO: 98484 - protein, 111 aa, Homo sapiens
  MOD_RES (1)..(1): Any amino acid
XVDLQNVLVVCESAARLQLSQLKEHCLNFVVKESHFNQVIMMKEFERLSSPLIVEIVRRKQQPPPRTPLDQPVDIGPFIPPALPGACADPGCWLLVMSAGTRGHAVGLEGA

SEQ ID NO: 98485 - protein, 69 aa, Homo sapiens
SPEEWECLRPAQRALYRDVMRETFGHLGALGEAGPSGRDPQIFSSQTRFYLVGGRRSGGVEPGGPGSRR

SEQ ID NO: 98486 - protein, 284 aa, Homo sapiens
MESFSKYSSVQKAVCQGEGDDTFENLVFDQSFLAPLVTEYDKHLGELNGQLKYYQKQVGEMKLQLENVIKENERLHSELKDAVEKKLEAFPLGTEVGTDIYADDETVRNLQEQLQLANQEKTQAVELWQTVSQELDRLHKLYQEHMTEAQIHVFESQKQKDQLFDFQQLTKQLHVTNENMEVTNQQFLKTVTEQSVIIEQLRKKLRSELSRQKLHTQELLSQLEMANEKVAENEKLILEHQEKANRLQRRLSQAEERAASASQQLSVITVQRRKAASLMNLENI

SEQ ID NO: 98487 - protein, 39 aa, Homo sapiens
MADSSGRGAGKPATGPTNSSSAKKKDKRVQVCPHRWKSD

SEQ ID NO: 98488 - protein, 267 aa, Homo sapiens
MSCINLPTVLPGSPSKTRGQIQVILGPMFSGKSTELMRRVRRFQIAQYKCLVIKYAKDTRYSSSFCTHDRNTMEALPACLLRDVAQEALGVAVIGIDEGQFFPDIVEFCEAMANAGKTVIVAALDGTFQRKPFGAILNLVPLAESVVKLTAVCMECFREAAYTKRLGTEKEVAPPAFPAGRRGGGMALPPSCPGPSPIPCPCGQVEVIGGADKYHSVCRLCYFKKASGQPAGPDNKENCPVPGKPGEAVAARKLFAPQQILQCSPAN

SEQ ID NO: 98489 - protein, 139 aa, Homo sapiens
  MOD_RES (1)..(1): Any amino acid
XRVCSLNEHFGNVLTPCTVLPVKLYSDARNVLSGIIDSHENLKEFKGDLIKVLVWILVQYCSKRPGMKENVHNTENKGKAPLMLPALNTLPPPKSPEDIDSLNSETFNDWSDDNIFDDEPTIKKVIEEKHQLKDLPGIL

SEQ ID NO: 98490 - protein, 226 aa, Homo sapiens
MPKKWLFLPFEDDLRRDLGRQFSVERLPAVVVLKPDGDVLTRDGADEIQRLGTACFANWQEAAEVLDRNFQLPEDLEDQEPRSLTECLRRHKSDWFLYDCRLLRHVALGLFCCGISVYLAALSIYALLLFEIETGAAAASILGSGTLVLVAVLTHTLLRAARAARRGLHELSPPSFEDDLARPAEVSKASPRAQPQQGIHRRTPYSTCPEPGDPFGSMATATAPAA

SEQ ID NO: 98491 - protein, 81 aa, Homo sapiens
MRCSPGGVWLALAASLLHVSLQGEFQRKLYKELVKNYNPLERPVANDSQPLTVYFSLSLLQIMDVILRINKKTDSICSGLC

SEQ ID NO: 98492 - protein, 169 aa, Homo sapiens
MAAGETQLYAKVSNKLKSRSSPSLLEPLLAMGFPVHTALKALAATGRKTAEEALAWLHDHCNDPSLDDPIPQEYALFLCPTGPLLEKLQEFWRESKRQCAKNRAHEVFPHVTLCDFFTCEDQKVECLYEALKRAGDRLLGSFPTAVPLALHSSISYLGFFVSGSPADVI

SEQ ID NO: 98493 - protein, 2146 aa, Homo sapiens
MMMMMMMKKMQHQRQQQADHANEANYARGTRLPLSGEGPTSQPNSSKQTVLSWQAAIDAARQAKAAQTMSTSAPPPVGSLSQRKRQQYAKSKKQGNSSNSRPARALFCLSLNNPIRRACISIVEWKPFDIFILLAIFANCVALAIYIPFPEDDSNSTNHNLEKVEYAFLIIFTVETFLKIIAYGLLLHPNAYVRNGWNLLDFVIVIVGLFSVILEQLTKETEGGNHSSGKSGGFDVKALRAFRVLRPLRLVSGVPSLQVVLNSIIKAMVPLLHIALLVLFVIIIYAIIGLELFIGKMHKTCFFADSDIVAEEDPAPCAFSGNGRQCTANGTECRSGWVGPNGGITNFDNFAFAMLTVFQCITMEGWTDVLYWVNDAIGWEWPWVYFVSLIILGSFFVLNLVLGVLSGEFSKEREKAKARGDFQKLREKQQLEEDLKGYLDWITQAEDIDPENEEEGGEEGKRNTSMPTSETESVNTENVSGEGENRGCCGSLCQAISKSKLSRRWRRWNRFNRRRCRAAVKSVTFYWLVIVLVFLNTLTISSEHYNQPDWLTQIQDIANKVLLALFTCEMLVKMYSLGLQAYFVSLFNRFDCFVVCGGITETILVELEIMSPLGISVFRCVRLLRIFKVTRHWTSLSNLVASLLNSMKSIASLLLLLFLFIIIFSLLGMQLFGGKFNFDETQTKRSTFDNFPQALLTVFQILTGEDWNAVMYDGIMAYGGPSSSGMIVCIYFIILFICGNYILLNVFLAIAVDNLADAESLNTAQKEEAEEKERKKIARKESLENKKNNKPEVNQIANSDNKVTIDDYREEDEDKDPYPPCDVPVGEEEEEEEEDEPEVPAGPRPRRISELNMKEKIAPIPEGSAFFILSKTNPIRVGCHKLINHHIFTNLILVFIMLSSAALAAEDPIRSHSFRNTILGYFDYAFTAIFTVEILLKMTTFGAFLHKGAFCRNYFNLLDMLVVGVSLVSFGIQSSAISVVKILRVLRVLRPLRAINRAKGLKHVVQCVFVAIRTIGNIMIVTTLLQFMFACIGVQLFKGKFYRCTDEAKSNPEECRGLFILYKDGDVDSPVVRERIWQNSDFNFDNVLSAMMALFTVSTFEGWPALLYKAIDSNGENIGPIYNHRVEISIFFIIYIIIVAFFMMNIFVGFVIVTFQEQGEKEYKNCELDKNQRQCVEYALKARPLRRYIPKNPYQYKFWYVVNSSPFEYMMFVLIMLNTLCLAMQHYEQSKMFNDAMDILNMVFTGVFTVEMVLKVIAFKPKGYFSDAWNTFDSLIVIGSIIDVALSEADNSEESNRISITFFRLFRVMRLVKLLSRGEGIRTLLWTFIKSFQALPYVALLIAMLFFIYAVIGMQMFGKVAMRDNNQINRNNNFQTFPQAVLLLFRCATGEAWQEIMLACLPGKLCDPESDYNPGEEYTCGSNFAIVYFISFYMLCAFLIINLFVAVIMDNFDYLTRDWSILGPHHLDEFKRIWSEYDPEAKGRIKHLDVVTLLRRIQPPLGFGKLCPHRVACKRLVAMNMPLNSDGTVMFNATLFALVRTALKIKTEGNLEQANEELRAVIKKIWKKTSMKLLDQVVPPAGDDEVTVGKFYATFLIQDYFRKFKKRKEQGLVGKYPAKNTTIALQAGLRTLHDIGPEIRRAISCDLQDDEPEETKREEEDDVFKRNGALLGNHVNHVNSDRRDSLQQTNTTHRPLHVQRPSIPPASDTEKPLFPPAGNSVCHNHHNHNSIGKQVPTSTNANLNNANMSKAAHGKRPSIGNLEHVSENGHHSSHKHDREPQRRSSVKRTRYYETYIRSDSGDEQLPTICREDPEIHGYFRDPHCLGEQEYFSSEECYEDDSSPTWSRQNYGYYSRYPGRNIDSERPRGYHHPQGFLEDDDSPVCYDSRRSPRRRLLPPTPASHRRSSFNFECLRRQSSQEEVPSSPIFPHRTALPLHLMQQQIMAVAGLDSSKAQKYSPSHSTRSWATPPATPPYRDWTPCYTPLIQVEQSEALDQVNGSLPSLHRSSWYTDEPDISYRTFTPASLTVPSSFRNKNSDKQRSADSLVEAVLISEGLGRYARDPKFVSATKHEIADACDLTIDEMESAASTLLNGNVRPRANGDVGPLSHRQDYELQDFGPGYSDEEPDPGRDEEDLADEMICITTL

SEQ ID NO: 98494 - protein, 237 aa, Homo sapiens
  MOD_RES (1)..(1): Any amino acid
XLLKTAVTQRIPSNYFAFALGRILSSHLLSSANFSGRIHNALKGIPDDRDGLFDTIQRSKNHYQKRAYQCIKCMVALFSSCPVAYQILQGNGDLKRKWTWAVEWLGDELERRPYTGNPQYSYNNWSPPVQSNETANGYFLERSHSARMTLAKACELCPEEEPDDQDAPDEHEPSPSEDAPLYPHSPASQYQQNNHVHGQPYTGPAAHHLNNPQKTGQRTQENYEGNEEVSSPQMKDQ

SEQ ID NO: 98495 - protein, 188 aa, Homo sapiens
MKLFDASPTFFAFLLGHILAMEVLAWLLIYLLGPGWVPSALAAFILAISQAQSWCLQHDLGHASIFKKSWWNHVAQKFVMGQLKGFSAHWWNFRHFQHHAKPNIFHKDPDVTVAPVFLLGESSVEYGKKKRRYLPYNQQHLYFFLIGPPLLTLVNFEVENLAYMLVCMQWADLLWAASFYARFFLSYL

SEQ ID NO: 98496 - protein, 352 aa, Homo sapiens
MAAGQRRSSLSRLGSQAEGLLTSQTMGGQAETLLTSQTGWLLGRGCNLGSPGGQVSWDKVRIPGVLQRLGVTYFVVAVLELLFAKPVPEHCASERSCLSLRDITSSWPQWLLILVLEGLWLGLTFLLPVPGCPTGYLGPGGIGDFGKYPNCTGGAAGYIDRLLLGDDHLYQHPSSAVLYHTEVAYDPEGILGTINSIVMAFLGVQAGKILLYYKARTKDILIRFTAWCCILGLISVALTKVSENEGFIPVNKNLWSLSYVTTLSSFAFFILLVLYPVVDVKGLWTGTPFFYPGMNSILVYVGHEVFENYFPFQWKLKDNQSHKEHLTQNIVATALWVLIAYILYRKKIFWKI

SEQ ID NO: 98497 - protein, 105 aa, Homo sapiens
MAAKSQPNIPKAKSLDGVTNDRTASQGQWGRAWEVDWFSLASVIFLLLFAPFIVYYFIMACDQYSCALTGPVVDIVTGHARLSDIWAKTPPITRKAAQLYTLWVT

SEQ ID NO: 98498 - protein, 99 aa, Homo sapiens
GKPRHSLYFIGYQDDFLLYLDPHYCQPTVDVSQADFPLEVLSSSSATERYPMFTLAEGHAQDHSLDDLCSQLAQPTLRLPRTGRLLRAKRPSSEDFVFL

SEQ ID NO: 98499 - protein, 699 aa, Homo sapiens
MLTKEQGDVIGIPFNVDVSSFPSRKMFCQCDSCGMSFNTVSELVISKINYLGKKSDEFNACGKLLLNIKHDETHTQEKNEVLKNRNTLSHHEETLQHEKIQTLEHNFEYSICQETLLEKAVFNTQKRENAEENNCDYNEFGRTLCDSSSLLFHQISPSRDNHYEFSDCEKFLCVKSTLSKPHGVSMKHYDCGESGNNFRRKLCLSHLQKGDKGEKHFECNECGKAFWEKSHLTRHQRVHTGQKPFQCNECEKAFWDKSNLTKHQRSHTGEKPFECNECGKAFSHKSALTLHQRTHTGEKPYQCNACGKTFCQKSDLTKHQRTHTGLKPYECYECGKSFRVTSHLKVHQRTHTGEKPFECLECGKSFSEKSNLTQHQRIHIGDKSYECNACGKTFYHKSLLTRHQIIHTGWKPYECYECGKTFCLKSDLTVHQRTHTGQKPFACPECGKFFSHKSTLSQHYRTHTGEKPYECHECGKIFYNKSYLTKHNRTHTGEKPYECNECGKAFYQKSQLTQHQRIHIGEKPYKCNECGKAFCHKSALIVHQRTHTQEKPYKCNECGKSFCVKSGLIFHERKHTGEKPYECNECGKFFRHKSSLTVHHRAHTGEKSCQCNECGKIFYRKSELAQHQRSHTGEKPYECNTCRKTFSQKSNLIVHQRRHIGENLMNEMDIRNFQPQVSLHNASEYSHCGESPDDILNVQ

SEQ ID NO: 98500 - protein, 32 aa, Homo sapiens
MSARATRPRSRRGRHAPPGELDPVAESSEEVE

SEQ ID NO: 98501 - protein, 107 aa, Homo sapiens
PLVCKKIAQERLTVLLFLEDCIITACQEGLICTWARPGKAELGASELAQDKYVADFLQWAEPIVVRLKEVRLQRDDFEILKVIGRGAFSEVAVVKMKQTGQVYAMKI

SEQ ID NO: 98502 - protein, 175 aa, Homo sapiens
MTFDLTKITKTSSSFEVRTWDPEGVIFYGDTNPKDDWFMLGLRDGRPEIQLHNHWAQLTVGAGPRLDDGRWHQLVPALDGCLRRDSWLDKQAEISASAPTSLRSCDVESNPGIFLPPGTQAEFNLRGEDSSTSFCLNGLWAQGQRLDVDQALNRSHEIWTHSCPQSPGNGTDASH

SEQ ID NO: 98503 - protein, 38 aa, Homo sapiens
  MOD_RES (1)..(1): Any amino acid
XLGEKVSQELKEPLHKALQMLLSQFWCLWFCYDKCFWN

SEQ ID NO: 98504 - protein, 205 aa, Homo sapiens
MDEALETQLKTSRGRFSATESLPTLELLSQVDMDCRVHMRPIGLTWVLQLTLAWILLEACGGSRPLQARSQQHHGLAADLGKGKLHLAGPCCPSEMDTTETSGPGNHPERCGVPSPECESFLEHLQRALRSRFRLRLLGVRQAQPLCEELCQAWFANCEDDITCGPTWLPLSEKRGCEPSCLTYGQAGVQWRDLSSMQPPPPGFK

SEQ ID NO: 98505 - protein, 41 aa, Homo sapiens
  MOD_RES (1)..(1): Any amino acid
XALDALAAGVQEESSTHKIVRCWYVPEGGLPECAAGRCLPN

SEQ ID NO: 98506 - protein, 221 aa, Homo sapiens
MFTMTRAMEEALFQHFMHQKLGIAYAIHKPFPFFEGLLDNSIITKRMYMESLEACRNLIPVSRVVHNILTQLERTFNLSLLVTLFSQINLREYPNLVTIYRSFKRVGASYEWQSRDTPILLEAPTGLAEGSSLHTPLALPPPQPPQPSCSPCAPRVSEPGTSSQQSDEILSESPSPSDPVLPLPALIQEGRSTSVTNDKLTSKMNAEEDSEEMPSLLTSTV

SEQ ID NO: 98507 - protein, 104 aa, Homo sapiens
MIETLARKLNEKSKEQMELHHQNLNLQETLKRVANCSAPCPQDWIWHGENCYLFSSGSFNWEKSQEKCLSLDAKLLKINSTADLDFIQQAISYSSFPFWMGLSR

SEQ ID NO: 98508 - protein, 107 aa, Homo sapiens
GGLVEKHYVFLKRLCQVLCALGNQLCALLGADSDVETPSNFGKYLESFLAFTTHPSQFLRSSTQMTWGALFRHEILSRDPLLLAIIPKYLRASMTNLVKPPEHNKER

SEQ ID NO: 98509 - protein, 84 aa, Homo sapiens
MLSVQPDTKPKGCAGCNRKIKDRYLLKALDKYWHEDCLKCACCDCRLGEVGSTLYTKANLILCRRDYLRLFGVTGNCAACSKLI

SEQ ID NO: 98510 - protein, 1400 aa, Homo sapiens
MAARRGRRDGVAPPPSGGPGPDPGGGARGSGWGSRSQAPYGTLGAVSGGEQVLLHEEAGDSGFVSLSRLGPSLRDKDLEMEELMLQDETLLGTMQSYMDASLISLIEDFGSLGESRLSLEDQNEVSLLTALTEILDNADSENLSPFDSIPDSELLVSPREGSSLHKLLTLSRTPPERDLITPVDPLGPSTGSSRGSGVEMSLPDPSWDFSPPSFLETSSPKLPSWRPPRSRPRWGQSPPPQQRSDGEEEEEVASFSGQILAGELDNCVSSIPDFPMHLACPEEEDKATAAEMAVPAAGDESISSLSELVRAMHPYCLPNLTHLASLEDELQEQPDDLTLPEGCVVLEIVGQAATAGDDLEIPVVVRQVSPGPRPVLLDDSLETSSALQLLMPTLESETEAAVPKVTLCSEKEGLSLNSEEKLDSACLLKPREVVEPVVPKEPQNPPANAAPGSQRARKGRKKKSKEQPAACVEGYARRLRSSSRGQSTVGTEVTSQVDNLQKQPQEELQKESGPLQGKGKPRAWARAWAAALENSSPKNLERSAGQSSPAKEGPLDLYPKLADTIQTNPIPTHLSLVDSAQASPMPVDSVEADPTAVGPVLAGPVPVDPGLVDLASTSSELVEPLPAEPVLINPVLADSAAVDPAVVPISDNLPPVDAVPSGPAPVDLALVDPVPNDLTPVDPVLVKSRPTDPRRGAVSSALGGSAPQLLVESESLDPPKTIIPEVKEVVDSLKIESGTSATTHEARPRPLSLSEYRRRRQQRQAETEERSPQPPTGKWPSLPETPTGLADIPCLVIPPAPAKKTALQRSPETPLEICLVPVGPSPASPSPEPPVSKPVASSPTEQVPSQEMPLLARPSPPVQSVSPAVPTPPSMSAALPFPAGGLGMPPSLPPPPLQPPSLPLSMGPVLPDPFTHYAPLPSWPCYPHVSPSGYPCLPPPPTVPLVSGTPGAYAVPPTCSVPWAPPPAPVSPYSSTCTYGPLGWGPGPQHAPFWSTVPPPPLPPASIGRAVPQPKMESRGTPAGPPENVLPLSMAPPLSLGLPGHGAPQTEPTKVEVKPVPASPHPKHKVSALVQSPQMKALACVSAEGVTVEEPASERLKPETQETRPREKPPLPATKAVPTPRQSTVPKLPAVHPARLRKLSFLPTPRTQGSEDVVQAFISEIGIEASDLSSLLEQFEKSEAKKECPPPAPADSLAVGNSGSSCSSSGRSRRCSSSSSSSSSSSSSSSSSSSSRSRSRSPSPRRRSDRRRRYSSYRSHDHYQRQRVLQKERAIEERRVVFIGKIPGRMTRSELKQRFSVFGEIEECTIHFRVQGDNYGFVTYRYAEEAFAAIESGHKLRQADEQPFDLCFGGRRQFCKRSYSDLDSNREDFDPAPVKSKFDSLDFDTLLKQAQKNLRR

SEQ ID NO: 98511 - protein, 145 aa, Homo sapiens
NNNLERALDWIFSHPEFEEDSDFVIEMENNANANIISEAKPEGPRVKDGSGRVLGVTRQPSQWTISGGTLLPLWRREDLGQGGVSCLGLYLLDVMSQIFLLFPRSWFADSPLNTYKSRVGTRYVQRLRHFDDTVSLRRMSSLLLL

SEQ ID NO: 98512 - protein, 1790 aa, Homo sapiens
MFRQFYLWTCLASGIILGSLFEICLGQYDDDWQYEDCKLARGGPPATIVAIDEESRNGTILVDNMLIKGTAGGPDPTIELSLKDNVDYWVLMDPVKQMLFLNSTGRVLDRDPPMNIHSIVVQVQCINKKVGTIIYHEVRIVVRDRNDNSPTFKHESYYATVNELTPVGTTIFTGFSGDNGATDIDDGPNGQIEYVIQYNPDDPTSNDTFEIPLMLTGNIVLRKRLNYEDKTRYFVIIQANDRAQNLNERRTTTTTLTVDVLDGDDLGPMFLPCVLVPNTRDCRPLTYQAAIPELRTPEELNPIIVTPPIQAIDQDRNIQPPSDRPGILYSILVGTPEDYPRFFHMHPRTAELSLLEPVNRDFHQKFDLVIKAEQDNGHPLPAFAGLHIEILDENNQSPYFTMPSYQGYILESAPVGATISDSLNLTSPLRIVALDKDIEDVPPSGVPTKDPELHLFLNDYTSVFTVTQTGITRYLTLLQPVDREEQQTYTFSITAFDGVQESEPVIVNIQVMDANDNTPTFPEISYDVYVYTDMRPGDSVIQLTAVDADEGSNGEITYEILVGAQGDFIINKTTGLITIAPGVEMIVGRTYALTVQAADNAPPAERRNSICTVYIEVLPPNNQSPPRFPQLMYSLEISEAMRVGAVLLNLQATDREGDSITYAIENGDPQRVFNLSETTGILTLGKALDRESTDRYILIITASDGRPDGTSTATVNIVVTDVNDNAPVFDPYLPRNLSVVEEEANAFVGQVKATDPDAGINGQVHYSLGNFNNLFRITSNGSIYTAVKLNREVRDYYELVVVATDGAVHPRHSTLTLAIKVLDIDDNSPVFTNSTYTVLVEENLPAGTTILQIEAKDVDLGANVSYRIRSPEVKHFFALHPFTGELSLLRSLDYEAFPDQEASITFLVEAFDIYGTMPPGIATVTVIVKDMNDYPPVFSKRIYKGMVAPDAVKGTPITTVYAEDADPPGLPASRVRYRVDDVQFPYPASIFEVEEDSGRVITRVNLNEEPTTIFKLVVVAFDDGEPVMSSSATVKILVLHPGEIPRFTQEEYRPPPVSELATKGTMVGVISAAAINQSIVYSIVSGNEEDTFGINNITGVIYVNGPLDYETRTSYVLRVQADSLEVVLANLRVPSKSNTAKVYIEIQDENNHPPVFQKKFYIGGVSEDARMFTSVLRVKATDKDTGNYSVMAYRLIIPPIKEGKEGFVVETYTGLIKTAMLFHNMRRSYFKFQVIATDDYGKGLSGKADVLVSVVNQLDMQVIVSNVPPTLVEKKIEDLTEILDRYVQEQIPGAKVVVESIGARRHGDAFSLEDYTKCDLTVYAIDPQTNRAIDRNELFKFLDGKLLDINKDFQPYYGEGGRILEIRTPEAVTSIKKRGESLGYTEGALLALAFIIILCCIPAILVVLVSYRQFKVRQAECTKTARIQAALPAAKPAVPAPAPVAAPPPPPPPPPGAHLYEELGDSSMHKYEMPQYGSRRRLLPPAGQEEYGEVVGEAEEEYEEEEEEPKKIKKPKVEIREPSEEEEVVVTIEKPPAAEPTYTTWKRARIFPMIFKKVRGLADKRGIVDLEGEEWQRRLEEEDKDYLKLTLDQEEATESTVESEEESSSDYTEYSEEESEFSESETTEEESESETPSEEEESSTPESEESESTESEGEKARKNIVLARRRPMVEEVKEVKGRKEEPQEEQKEPKMEEEEHSEEEESGPAPVEESTDPEAQDIPEEGSAESASVEGGVESEEESESGSSSSSSESQSGGPWGYQVPAYDRSKNANQKKSPGANSEGYNTAL

SEQ ID NO: 98513 - protein, 119 aa, Homo sapiens
MGRRRQRVDPAAGARAGALPEAIAALSRSLPSGPSPEIFRRAKFDRPEATSALWQLLFRVLSPLPAGNALATRGWHWHNYLRMARRAVGSCCWLCPGSWPEDLCPSRCWPRPECLWVTR

SEQ ID NO: 98514 - protein, 41 aa, Homo sapiens
MAGRLPACVVDCGTGYTKLGYAGNTEPQFIIPSLANPPWYS

SEQ ID NO: 98515 - protein, 118 aa, Homo sapiens
  MOD_RES (1)..(1): Any amino acid
XPFVEKPVSAEDHNVYIYYPSSAGGGSQRLFRKIGSRSSVYSPESSVRKTGSYIYEEFMPTDGTDVKGELWAYSVMLCTCRCIQWGQIMPMLKLENLQLWMGRLNETVRGKRFDIQSC

SEQ ID NO: 98516 - protein, 68 aa, Homo sapiens
MSAPPALQIREANAHLAAVHRRAAELEARLDAAERTVHAQAERLALHDQQLRAALDELGRAKDRGTFH

SEQ ID NO: 98517 - protein, 468 aa, Homo sapiens
MGESIPLAAPVPVEQAVLETFFSHLGIFSYDKAKDNVEKEREANKSAGGSWLSLLAALAHLAAAEKVYHSLTYLGQKLGGQSFFSRKDSIRTIYTSLHNELKKVVTGRGALGGTAPHVEELLSHLSEQLCFFVQARMEIADFYEKMYTLSTQKFINAEELVGLLDAIMKKYSSRFHHPILSPLESSFQLEVDVLCHLLKAQAQVSEWKFLPSLVNLHSAHTKLQTWGQIFEKQRETKKHLFGGQSQKAVQPPHLFLWLMKLKNMLLAKFSFYFHEALSRQTTASEMKTLTAKANPDFFGKISSFIRKYDAANVSLIFDNRGSESFQGHGYHHPHSYREAPKGVDQYPAVVSLPSDRPVMHWPNVIMIMTDRTSDLNSLEKVVHFYDDKVQSTYFLTRPEPHFTIVIIFESKKSERDSHFISFLNEVSLALKNPKVFASLKPGAKGSCYQCNYFVAFCLNYSKLLLQRK

SEQ ID NO: 98518 - protein, 156 aa, Homo sapiens
  MOD_RES (1)..(1): Any amino acid
XESSLALNYAAGPRGGPTHLTKPTTTSSSERERDRDRERDRDREREKSILTSTTTVEHAPIWRPGTEQSSGSSGGGGGSSSRPASHSHAHQHSPISPRTQDALQQRPSVLHNTGMKGIITAVEPSTPTVLRSTSTSSPVRPAATFPPATHCPLGGT

SEQ ID NO: 98519 - protein, 134 aa, Homo sapiens
MEGKWLLCMLLVLGTAIVEAHDGHDDDVIDIEDDLDDVIEEVEDSKPDTTAPPSSPKVTYKAPVPTGEVYFADSFDRGTLSGWILSKAKKDDTDDEIAKYDGKWEVEEMKESKLPGDKGLVLMSRAKHHAISAK

SEQ ID NO: 98520 - protein, 12 aa, Homo sapiens
MVLAAETTSQQE

SEQ ID NO: 98521 - protein, 964 aa, Homo sapiens
  MOD_RES (1)..(1): Any amino acid
XAQKINNGSSQADGTLKPVDEKEEAVAAEVGWMTSVKDWAGVMISAQTLTGRVLVVLVFALSIGALVIYFIDSSNPIESCQNFYKDFTLQIDMAFNVFFLLYFGLRFIAANDKLWFWLEVNSVVDFFTVPPVFVSVYLNRSWLGLRFLRALRLIQFSEILQFLNILKTSNSIKLVNLLSIFISTWLTAAGFIHLVENSGDPWENFQNNQALTYWECVYLLMVTMSTVGYGDVYAKTTLGRLFMVFFILGGLAMFASYVPEIIELIGNRKKYGGSYSAVSGRKHIVVCGHITLESVSNFLKDFLHKDRDDVNVEIVFLHKVISIKNYHPKIRIITQMLQYHNKAHLLNIPSWNWKEGDDAICLAELKLGFIAQSCLAQGLSTMLANLFSMRSFIKIEEDTWQKYYLEGVSNEMYTEYLSSAFVGLSFPTVCELCFVKLKLLMIAIEYKSANRESRILINPGNHLKIQEGTLGFFIASDAKEVKRAFFYCKACHDDITDPKRIKKCGCKRLEDEQPSTLSPKKKQRNGGMRNSPNTSPKLMRHDPLLIPGNDQIDNMDSNVKKYDSTGMFHWCAPKEIEKVILTRSEAAMTVLSGHVVVCIFGDVSSALIGLRNLVMPLRASNFHYHELKHIVFVGSIEYLKREWETLHNFPKVSILPGTPLSRADLRAVNINLCDMCVILSANQNNIDDTSLQDKECILASLNIKSMQFDDSIGVLQANSQGFTPPGMDRSSPDNSPVHGMLRQPSITTGVNIPIITELVNDTNVQFLDQDDDDDPDTELYLTQPFACGTAFAVSVLDSLMSATYFNDNILTLIRTLVTGGATPELEALIAEENALRGGYSTPQTLANRDRCRVAQLALLDGPFADLGDGGCYGDLFCKALKTYNMLCFGIYRLRDAHLSTPSQCTKRYVITNPPYEFELVPTDLIFCLMQFDHNAGQSRASLSHSSHSSQSSSKKSSSVHSIPS

SEQ ID NO: 98522 - protein, 64 aa, Homo sapiens
TNVEKADKQRNNSLMLKALVDRILSQTANDLRKQCDVVDTAFKNGLKDTKDARDKLADHLAKRS

SEQ ID NO: 98523 - protein, 190 aa, Homo sapiens
  MOD_RES (1)..(1): Any amino acid
XRCNVIGVKNCGKSGVLQALLGRNLMVRRQKKIREDHKSYYAINTVYVYGQEKYLLLHDISESEFLTEAEIICDVVCLVYDVSNPKSFEYCARIFKQHFMDSRIPCLIVAAKSDLHEVKQEYSISPTDFCRKHKMPPPQAFTCNTADAPSKDIFVKLTTMAMYPHARLRCMCTCNRCTFCICQNFLNSDL

SEQ ID NO: 98524 - protein, 183 aa, Homo sapiens
MEAQNTTEVYVKWKFKGRDIYTFDGALNKSTVPTDFSSAKIEVSQLLKGDASLKMDKSDAVSHTGNYTCEVTELTREGETIIELKYRVVSWFSPNENILIVIFPIFAILLFWGQFGIKTLKYRSGGMDEKTIALLVAGLVITVIVIVGAILFVPGEYSLKNATGLGLIVTSTGILILLHYYVF

SEQ ID NO: 98525 - protein, 82 aa, Homo sapiens
YYLDREAGRAPGDAVHKIYPSAYIKVFDLRQCHRQMQQQAATAQAAAAAQAAAVAGNIPGPGSVGGIAPAISKYAFHSFLKV

SEQ ID NO: 98526 - protein, 96 aa, Homo sapiens
MSEKVDWLQSQNGVCKVDVYSPGDNQAQDWKMDTSTDPVRVLSWLRRDLEKSTAEFQDVRFKPGESFGGETSNSGDPHKGFSVDYYNTTTKGTPER

SEQ ID NO: 98527 - protein, 117 aa, Homo sapiens
MDDSETGFNLKVVLVSFKQCLDEKEEVLLDPYIASWKGLVRFLNSLGTIFSFISKDVVSKLRIMERLRGGPQSEHYRSLQAMVAHELSNRLVDLERRSHHPESGCRTVLRLHRALHW

SEQ ID NO: 98528 - protein, 594 aa, Homo sapiens
MFGKMFFVFCQESGYDTILRVLGSNVREFLQNLDALHDHLATIYPGMRAPSFRCTDAEKGKGLILHYYSEREGLQDIVIGIIKTVAQQIHGTEIDMKVIQQRNEECDHTQFLIEEKESKEEDFYEDLDRFEENGTQESRISPYTFCKAFPFHIIFDRDLVVTQCGNAIYRVLPQLQPGNCSLLSVFSLVRPHIDISFHGILSHINTVFVLRSKEGLLDVEKLECEDELTGTEISCLRLKGQMIYLPEADSILFLCSPSVMNLDDLTRRGLYLSDIPLHDATRDLVLLGEQFREEYKLTQELEILTDRLQLTLRALEDEKKKTDTGCPARIQAFKVQTTLMLCEKDSRSTKGFPSISYSGFLLIPLNRLLYSVLPPSVANELRHKRPVPAKRYDNVTILFSGIVGFNAFCSKHASGEGAMKIVNLLNDLYTRFDTLTDSRKNPFVYKVETVGDKYMTVSGLPEPCIHHARSICHLALDMMEIAGQVQVDGESVQITIGIHTGEVVTGVIGQRMPRYCLFGNTVNLTSRTETTGEKGKINVSEYTYRCLMSPENSDPQFHLEHRGPVSMKGKKEPMQVWFLSRKNTGTEETKQDDD

SEQ ID NO: 98529 - protein, 30 aa, Homo sapiens
  MOD_RES (1)..(1): Any amino acid
XSLDYNLHGAFQLLEALRQAVQRRRQRRPH

SEQ ID NO: 98530 - protein, 109 aa, Homo sapiens
  MOD_RES (1)..(1): Any amino acid
XSPVEMETSTEPMDPLTPSAAALAVQPEAAGSVAMEASSDGEEDAESTDKVTETVMNGGMKETLSLTVDAKTETAVFKRFFDTFTESAVLLTCSRGHIIPPNSSFLGVF

SEQ ID NO: 98531 - protein, 62 aa, Homo sapiens
MPAATVDHSQRICEVWACNLDEEMKKIRQVIRKYNYVAMGFGVEKNLVSEKQLESTGRFPLF

SEQ ID NO: 98532 - protein, 58 aa, Homo sapiens
MSSDEEKYSLPVVQNDSSRGSSVSSNLQKILMNSSYTLYKGFNQHSKRKNMKNCFIML

SEQ ID NO: 98533 - protein, 22 aa, Homo sapiens
MFYCATLGVNLIACLAWWIGGG

SEQ ID NO: 98534 - protein, 96 aa, Homo sapiens
  MOD_RES (1)..(1): Any amino acid
XNGAQYRGILEASLELFKFTIGMGELAFQEQLHFRGMVLLLLLAYVLLTYILLLNMLIALMSETVNSVATDSWSIWKLQGGGGELGFMGADAAYAV

SEQ ID NO: 98535 - protein, 61 aa, Homo sapiens
MLNDQLMLLERTFLNPRAFPEERYYSHVLWAPRTGSVVTFPGLSNACSRARDTASGSEAWA

SEQ ID NO: 98536 - protein, 228 aa, Homo sapiens
MFQLLIPLLLALKGHAQDNPENVQCGHRPAFPNSSWLPFHERLQVQNGECPWQVSIQMSRKHLCGGSILHWWWVLTAAHCFRRTLLDMAVVNVTVVMGTRTFSNIHSERKQVQKEEERTWDWCWMAQWVTTNGYDQYDDLNMHLEKLRVVQISRKECAKRINQLSRNMICAWNEPGTNGIFKGDSGAPLVCAIYGTQRLFQVGVFSGGIRSGSRGRPGMFVSVAQFIP

SEQ ID NO: 98537 - protein, 150 aa, Homo sapiens
MDSRVSGTTSNGETKPVYPVMEKKEEDGTLERGHWNNKMEFVLSVAGEIIGLGNVWRFPYLCYKNGGEHCMEFQKTNGSLNGTSENATSPVIEFWERRVLKISDGIQHLGALRWELALCLLLAWVICYFCIWKGVKSTGKVVYFTATFPY

SEQ ID NO: 98538 - protein, 403 aa, Homo sapiens
MMDLRNTPAKSLDKFIEDYLLPDTCFRMQINHAIDIICGFLKERCFRGSSYPVCVSKVVKGGSSGKGTTLRGRSDADLVVFLSPLTTFQDQLNRRGEFIQEIRRQLEACQRERAFSVKFEVQAPRWGNPRALSFVLSSLQLGEGVEFDVLPAFDALGQLTGGYKPNPQIYVKLIEECTDLQKEGEFSTCFTELQRDFLKQRPTKLKSLIRLVKHWYQNCKKKLGKLPPQYALELLTVYAWERGSMKTHFNTAQGFRTVLELVINYQQLCIYWTKYYDFKNPIIEKYLRRQLTKPRPVILDPADPTGNLGGGDPKGWRQLAQEAEAWLNYPCFKNWDGSPVSSWILLTQHTPGSIHPTGRRGLDLHHPLNASASWGKGLQCYLDQFLHFQVNLTLVGRRNYTNN

SEQ ID NO: 98539 - protein, 134 aa, Homo sapiens
  MOD_RES (1)..(1): Any amino acid
XFFVENSLRTRRNLRGDIERKSLAINEEFVSIFKEVKEELESISEDVQAMSNCCQDMTSRLQAAKEQTQDLIVKTTKLQSESQKLEIRAQVADAFLSKFQLTSDEMSLLRGTREGPITEFRNYGTDGLTSRNGL

SEQ ID NO: 98540 - protein, 39 aa, Homo sapiens
MLLLAAAFLVAFVLLLYMVSPLISPKPLALPGAHVVFFR

SEQ ID NO: 98541 - protein, 318 aa, Homo sapiens
MTEGQEEKATAACFGTVTAQLQRLFCRLPKSRSVSKKHQILQRFRNGARRARDCKFTCHPECRSLIQLDCSQQEGLSRDRPSPESTLTVTFSQNVCKPVEETQRPPTLQEIKQKIDSYNTREKNCLGMKLSEDGTYTGFIKVHLKLRRPVTVPAGIRPQSIYDAIKEVNLAATTDKRTSFYLPLDAIKQLHISSTTTVSEVIQGLLKKFMVVDNPQKFALFKRIHKDGQVLFQKLSIADRPLYLRLLAGPDTEVLSFVLKENETGEVEWDAFSIPELQNFLTILEKEEQDKIQQVQKKYDKFRQKLEEALRESQGKPG

SEQ ID NO: 98542 - protein, 65 aa, Homo sapiens
MEFDCEGLRRLLGKYKFRDLTVEELRNVNVFFPHFKYSMDTYVFKDSSQKDLLNFTGTIPVMYQA

SEQ ID NO: 98543 - protein, 150 aa, Homo sapiens
MALVAPEAPSEQARRVFQTYDPEDNGFIPDSLLEDVMKALDLVSDPEYINLMKNKLDPEGLGIILLGPFLQEFFPDQGSSGPESFTVYHYNGLKQSNYNEKVMYVEGTAVVMGFEDPMLQTDDTPIKRCLQTKWPYIELLWTTDRSPSLN

SEQ ID NO: 98544 - protein, 375 aa, Homo sapiens
  MOD_RES (1)..(1): Any amino acid
XYSHHNFPPPSFNSFQNNPSSFLPSANNSSSPHFRHLPPYPLPKAPSERRSPERLKHYDDHRHRDHSHGRGERHRSLDRRERGRSPDRRRQDSRYRSDYDRGRTPSRHRSYERSSRSPSREKKRARWEEEKDRWSDNQSSGKDKNYTSIKEKEPEETMPDKNEEEEEELLKPVWIRCTHSENYYSSDPMDQVGDSTVVGTSRLRDLYDKFEEELGSRQEKAKAARPPWEPPKTKLDEDLESSSESECESDEDSTCSSSSDSEVFDVIAEIKRKKAHPDRLHDELWYNDPGQMNDGPLCKCSAKARRTGIRHSIYPGEEAIKPCRPMTNNAGRLFHYRITVSPPTNFLTDRPTVIEYDDHEYIFEGFSMFAHAPLT

SEQ ID NO: 98545 - protein, 97 aa, Homo sapiens
MVDTEMPFWPTNFGISSVDLSVMEDHSHSFDIKPFTTVDFSSISTPHYEDIPFTRTDPVVADYKYDLKLQEYQSAIKVEPASPPYYSEKTQLYNKPH

SEQ ID NO: 98546 - protein, 163 aa, Homo sapiens
MNGEEEFFDAVTGFDSDNSSGEFSEANQKVTGMIDLDTSKNNRIGKTGERPSQENGIQKHRTSLPAPMFSRSDFSVWTILKKCVGLELSKITMPIAFNEPLSFLQRITEYMEHVYLIHRASCQPQPLERMQSVAAFAVSAVASQWERTGKPFNPLLGETYELI

SEQ ID NO: 98547 - protein, 200 aa, Homo sapiens
MSVNVNRSVSDQFYRYKMPRLIAKVEGKGNGIKTVIVNMVDVAKALNRPPTYPTKYFGCELGAQTQFDVKNDRYIVNGSHEANKLQDMLDGFIKKFVLCPECENPETDLHVNPKKQTIGNSCKACGYRGMLDTHHKLCTFILKNPPENSDSGTGKKEKEKKNRKGKDKENGSVSSSETPPPPPPPNEINPPPHTMEEEED

SEQ ID NO: 98548 - protein, 178 aa, Homo sapiens
MEPVSRPAASSVTRCPPWFAPFVTGSTDGIGKSYAEELAKHGMKVVLISRSKDKLDQVSSEIKEKFKVETRTIAVDFASEDIYDKIKTGLAGLEIGILVNNVGMSYEYPEYFLDVPDLDNVIKKMININILSVCKMTQLVLPGMVERSKGAILNISSGSGMLPVPLLTIYSATKTFVD

SEQ ID NO: 98549 - protein, 201 aa, Homo sapiens
MASALWTVLPSRMSLRSLKWSLLLLSLLSFFVMWYLSLPHYNVIERVNWMYFYEYEPIYRQDFHFTLREHSNCSHQNPFLVILVTSHPSDVKARQAIRVTWGEKKSWWGYEVLTFFLLGQEAEKEDKMLALSLEDEHLLYGDIIRQDFLDTYNNLTLKTIMAFRIHLDVCQLRRVIAAHGFSSKEIITFWQVMLRNTTCHY

SEQ ID NO: 98550 - protein, 80 aa, Homo sapiens
MASSSTVPLGFHYETKYVVLSYLGLLSQEKLQEQHLSSPQGVQLDIASQSLDQEILLKVKTEIEEELKSLDKEISEGHCV

SEQ ID NO: 98551 - protein, 325 aa, Homo sapiens
  MOD_RES (1)..(1): Any amino acid
XWLFRLDISFESQHILLRGDKTSRDMWATGSLPDFPAAAKFLGFRQRCIPRSLCLSECPLEPPSLTRLCATLKDCPGPLELQLSCEFLSDQSLETLLDCLPQLPQLSLLQLSQTGLSPKSPFLLANTLSLCPRVKKVDLRSLHHATLHFRSNEEEEGVCCGFTGCSLSQEHVESLCWLLSKCKDLSQVDLSANLLGDSGLRCLLECLPQVPISGLLDLSHNSISQESALYLLETLPSCPRVREASVNLGSEQSFRIHFSREDQAGKTLRLSECSFRPEHVSRLATGLSKSLQLTELTLTQCCLGQKQLAILLSLVGRPAGLFSLS

SEQ ID NO: 98552 - protein, 176 aa, Homo sapiens
MAAATGDPGLSKLQFAPFSSALDVGFWHELTQKKLNEYRLDEAPKDIKGYYYNGDSAGLPARLTLEFSAFDMSAPTPARCCPAIGTLYNTNTLESFKTADKKLLLEQAANEIWESIKSGTALENPVLLNKFLLLTFADLKKYHFYYWFCYPALCLPESLPLIQGPVGLDQRFSLKQ

SEQ ID NO: 98553 - protein, 165 aa, Homo sapiens
MLPKRRRARVGSPSGDAASSTPPSTRFPGVAIYLVEPRMGRSRRAFLTGLARSKGFRVLDACSSEATHVVMEETSAEEAVSWQERRMAAAPPGCTPPALLDISWLTESLGAGQPVPVECRHRLEVAGPRKGPLSPAWMPAYACQRPTPLTHHNTGLSGPSLQEAL

SEQ ID NO: 98554 - protein, 69 aa, Homo sapiens
MNGDSRAAVVTSPPPTTAPHKERYFDRVDENNPEYLRERNMAPDLRQDFNMMEQKKRVSMILQSPVLVW

SEQ ID NO: 98555 - protein, 189 aa, Homo sapiens
MMVVLLGATTLVLVAVAPWVLSAAAGGKNLKSPQKVEVDIIDDNFILRWNRSDESVGNVTFSFDYQKTGMDNWIKLSGCQNITSTKCNFSSLKLNVYEEIKLRIRAEKENTSSWYEVDSFTPFRKVENELPPPENIEVSVQNQNYVLKWDYTYANMTFQVQWLHAFLKRNPGNHLYKWKQIPDCENVKT

SEQ ID NO: 98556 - protein, 292 aa, Homo sapiens
MSGACAPRGSRSLLPWIGCTRSLDWSPSPLRGRCTSCPGWRGRSFRPGTAATRTQGSTARPLFTSIRCTKTRPAISFTTVAAFSRSLLLQVRGSGGARLSTKDPLPTIASREEIEATKNHVLETFYPISPIIDLHECNIYDVKNDTGFQEGYPYPYPHTLYLLDKANLRPHRLQPDQLRAKMILFAFGSALAQARLLYGNDAKVLEQPVVVQSVGTDGRVFHFLVFQLNTTDLDCNEGVKNLAWVDSDQLLYQHFWCLPVIKKRVVVEPVGPVGFKPETFRKFLALYLHGAA

SEQ ID NO: 98557 - protein, 1173 aa, Homo sapiens
MQDVQGPRPGSPGDAEDRRELGLHRGEVNFGGSGKKRGKFVRVPSGVAPSVLFDLLLAEWHLPAPNLVVSLVGEEQPFAMKSWLRDVLRKGLVKAAQSTGAWILTSALRVGLARHVGQAVRDHSLASTSTKVRVVAVGMASLGRVLHRRILEEAQEDFPVHYPEDDGGSQGPLCSLDSNLSHFILVEPGPPGKGDGLTELRLRLEKHISEQRAGYGGTGSIEIPVLCLLVNGDPNTLERISRAVEQAAPWLILVGSGGIADVLAALVNQPHLLVPKVAEKQFKEKFPSKHFSWEDIVRWTKLLQNITSHQHLLTVYDFEQEGSEELDTVILKALVKACKSHSQEPQDYLDELKLAVAWDRVDIAKSEIFNGDVEWKSCDLEEVMVDALVSNKPEFVRLFVDNGADVADFLTYGRLQELYRSVSRKSLLFDLLQRKQEEARLTLAGLGTQQAREPPAGPPAFSLHEVSRVLKDFLQDACRGFYQDGRPGDRRRAEKGPAKRPTGQKWLLDLNQKSENPWRDLFLWAVLQNRHEMATYFWAMGQEGVAAALAACKILKEMSHLETEAEAARATREAKYERLALDLFSECYSNSEARAFALLVRRNRCWSKTTCLHLATEADAKAFFAHDGVQAFLTRIWWGDMAAGTPILRLLGAFLCPALVYTNLITFSEEAPLRTGLEDLQDLDSLDTEKSPLYGLQSRVEELVEAPRAQGDRGPRAVFLLTRWRKFWGAPVTVFLGNVVMYFAFLFLFTYVLLVDFRPPPQGPSGPEVTLYFWVFTLVLEEIRQGFFTDEDTHLVKKFTLYVGDNWNKCDMVAIFLFIVGVTCRMLPSAFEAGRTVLAMDFMVFTLRLIHIFAIHKQLGPKIIVVERMMKDVFFFLFFLSVWLVAYGVTTQALLHPHDGRLEWIFRRVLYRPYLQIFGQIPLDEIDEARVNCSTHPLLLEDSPSCPSLYANWLVILLLVTFLLVTNVLLMNLLIAMFSYTFQVVQGNADMFWKFQRYNLIVEYHERPALAPPFILLSHLSLTLRRVFKKEAEHKREHLERDLPDPLDQKVVTWETVQKENFLSKMEKRRRDSEGEVLRKTAHSLTTCSCRRVDFIAKYLGGLREQEKRIKCLESQINYCSVLVSSVADVLAQGGGPRSSQHCGEGSQLVAADHRGGLDGWEQPGAGQPPSDT

SEQ ID NO: 98558 - protein, 132 aa, Homo sapiens
  MOD_RES (1)..(1): Any amino acid
XQYAADLRRYINMLTRPRCVPQLGREIPAPGTLGPLHIPGHTLSPAPAPAPSRPALGKTGHLCSTGLDQCALGKMVPTGRYETGGLAPGHSACPCCLFPPRYGKRHKEDTLAFSEWGSPHAAVPRELSPLDL

SEQ ID NO: 98559 - protein, 191 aa, Homo sapiens
MVMACRVVNKRRHMGLQQLSSFAETGRTFLGPLKSSKFIIDEECHESVLISSTVRLLESLDLTSAVGQLLNEAVQAQNNTYRTGISTLLFLVGAWSSAVEECLHLGVPISIIVSVMSEGLNFCSEEVVSLHVPVHNIFDCMDSTKTFSQLETFSVSLCPFLQVPSDTDLIEELHGLKDVASQTLTISNLSG

SEQ ID NO: 98560 - protein, 158 aa, Homo sapiens
MEGETGSSPCLQENSADCSAGELRGPGKELWSPIQQVTATSSKWAQFVLPPRKSSHVDSEQPRSLQRDPRPAGPAQAKQGTPRAQASREGLSRPTAAVQLPRATHPVTSGSERPCGKTSWDARTPWAEGGPLVLEAQNPRPTRLCDLFITGEDFDDDV

SEQ ID NO: 98561 - protein, 143 aa, Homo sapiens
MRAKAFPETRDYSQPTAAATVQDIKKPVQQPAKQAPHQTLAARFMDGHITFQTAATVKIPTTTPATTKNTATTSPITYTLVTTQATPNNSHTAPPVTEVTVGPSLAPYSLPPTITPPAHTTGTSSSTVSHTTGNTTQPSNQTT

SEQ ID NO: 98562 - protein, 76 aa, Homo sapiens
MKLKKQVTVCGAAIFCVAVFSLYLMLDRVQHDPTRHQNGGNFPRSQISVLQNRIEQLEQLLEENHEIISHIKDSVL

SEQ ID NO: 98563 - protein, 82 aa, Homo sapiens
MAVFGMGCFWGAERKFWVLKGVYSTQVGFAGGYTSNPTYKEVCSEKTGHAEVVRVVYQPEHMSFEELLKVFWENHDPTQGMR

SEQ ID NO: 98564 - protein, 132 aa, Homo sapiens
MKHENVIGLLDVFTPARSLEEFNDVYLVTHLMGADLNNIVKCQKLTDDHVQFLIYQILRGLKYIHSADIIHRDLKPSNLAVNEDCELKILDFGLARHTDDEMTGYVATRWYRAPEIMLNWMHYNQTVDIWSV

SEQ ID NO: 98565 - protein, 137 aa, Homo sapiens
MDKNELVQKAKLAEQAERYDDMAACMKSVTEQGAELSNEERNLLSVAYKNVVGARRSSWRVVSSIEQKTEGAEKKQQMAREYREKIETELRDICNDVLSLLEKFLIPNASQAESKVFYLKMKGDYYRYLAEVAAGDD

SEQ ID NO: 98566 - protein, 118 aa, Homo sapiens
MGLLAFRDVALEFSPEEWECLDPAQRSLYRDVMLENYRNLISLGLAMSKPELIICLEARKEPWNVNTEKTARHSVETRFRHVGQAGLKLLTSGDPPALASQSAGITGTGHHCQPICVF

SEQ ID NO: 98567 - protein, 118 aa, Homo sapiens
MVSFTERGLDKEERPSEEKIRHSLLIPVRATCKARIRVQLRWGNSRKREIHSMDSCQDRAGQHQGHEPKVQKDCLTLEKKPKASDTVHISEMRRPMMPAVGDPQRPTPGTASGPDLSL

SEQ ID NO: 98568 - protein, 54 aa, Homo sapiens
  MOD_RES (1)..(1): Any amino acid
XYGNVVELRINSGGKLPNFGFVVFDDSEPVQKVLSNRSGHLDSYSPSCSEVRSV

SEQ ID NO: 98569 - protein, 139 aa, Homo sapiens
MLTLASKLKRDDGLKGSRTAATASDSTRRVSVRDKLLVKDEGYYQGGKFQFETEVPDAYNMVPPKVKCLTKIWHPNITETGEICLSLLREHSIDGTGWAPTRTLKDVVWGLNSLFTDLLNFDDPLNIEAAEHHLRDKED

SEQ ID NO: 98570 - protein, 800 aa, Homo sapiens
MVKLANPLYTEWILEAIQKIKKQKQRPSEERICHAVSTSHGLDKKTVSEQLELSVQDGSVLKVTNKGLASYKDPDNPGRFSSVKPGTFPKSAKGSRGSCNDLRNVDWNKLLRRAIEGLEEPNGSSLKNIEKYLRSQSDLTSTTNNPAFQQRLRLGAKRAVNNGRLLKDGPQYRVNYGSLDGKGAPQYPSAFPSSLPPVSLLPHEKDQPRADPIPICSFCLGTKESNREKKPEELLSCADCGSSGHPSCLKFCPELTTNVKALRWQCIECKTCSACRVQGRNADNMLFCDSCDRGFHMECCDPPLSRMPKGMWICQVCRPKKKGRKLLHEKAAQIKRRYAKPIGRPKNKLKQRLLSVTSDEGSMNAFTGRGSPDTEIKINIKQESADVNVIGNKDVVTEEDLDVFKQAQELSWEKIECESGVEDCGRYPSVIEFGKYEIQTWYSSPYPQEYARLPKLYLCEFCLKYMKSKNILLRHSKKCGWFHPPANEIYRRKDLSVFEVDGNMSKIYCQNLCLLAKLFLDHKTLYYDVEPFLFYVLTKNDEKGCHLVGYFSKEKLCQQKYNVSCIMIMPQHQRQGFGRFLIDFSYLLSRREGQAGSPEKPLSDLGRLSYLAYWKSVILEYLYHHHERHISIKAISRATGMCPHDIATTLQHLHMIDKRDGRFVIIRREKLILSHMEKLKTCSRANELDPDSLRWTPILISNAAVSEEEREAEKEAERLMEQASCWEKEEQEILSTRANSRQSPAKVQSKNKYLHSPESRPVTGERGQLLELSKESSEEEEEEEDEEEEEEEEEEEEDEE

SEQ ID NO: 98571 - protein, 214 aa, Homo sapiens
MSDKSELKAELERKKQRLAQIREEKKRKEEERKKKETDQKKEAVAPVQEESDLEKKRREAEALLQSMGLTPESPIAEQPLRVVTADTCLFHYLVPPPMSPSSKSVSTPSEAGSQDSGDGAVGSRTLHWDTDPSVLQLHSDSDLGRGPIKLGMAKITQVDFPPREIVTYTKETQTPVMAQPKEDEEEDDDVVAPKPPIEPEEEKTLKKDEENDSK

SEQ ID NO: 98572 - protein, 1238 aa, Homo sapiens
MANGGGGGGGSSGGGGGGGGSSLRMSSNIHANHLSLDASSSSSSSSSSSSSSSSSSSSSSVHEPKMDALIIPVTMEVPCDSRGQRMWWAFLASSMVTFFGGLFIILLWRTLKYLWTVCCHCGGKTKEAQKINNGSSQADGTLKPVDEKEEAVAAEVGWMTSVKDWAGVMISAQTLTGRVLVVLVFALSIGALVIYFIDSSNPIESCQNFYKDFTLQIDMAFNVFFLLYFGLRFIAANDKLWFWLEVNSVVDFFTVPPVFVSVYLNRSWLGLRFLRALRLIQFSEILQFLNILKTSNSIKLVNLLSIFISTWLTAAGFIHLVENSGDPWENFQNNQALTYWECVYLLMVTMSTVGYGDVYAKTTLGRLFMVFFILGGLAMFASYVPEIIELIGNRKKYGGSYSAVSGRKHIVVCGHITLESVSNFLKDFLHKDRDDVNVEIVFLHNISPNLELEALFKRHFTQVEFYQGSVLNPHDLARVKIESADACLILANKYCADPDAEDASNIMRVISIKNYHPKIRIITQMLQYHNKAHLLNIPSWNWKEGDDAICLAELKLGFIAQSCLAQGLSTMLANLFSMRSFIKIEEDTWQKYYLEGVSNEMYTEYLSSAFVGLSFPTVCELCFVKLKLLMIAIEYKSANRESRSRKRILINPGNHLKIQEGTLGFFIASDAKEVKRAFFYCKACHDDITDPKRIKKCGCKRLIYFEDEQPSTLSPKKKQRNGGMRNSPNTSPKLMRHDPLLIPGNDQIDNMDSNVKKYDSTGMFHWCAPKEIEKVILTRSEAAMTVLSGHVVVCIFGDVSSALIGLRNLVMPLRASNFHYHELKHIVFVGSIEYLKREWETLHNFPKVSILPGTPLSRADLRAVNINLCDMCVILSANQNNIDDTSLQDKECILASLNIKSMQFDDSIGVLQANSQGFTPPGMDRSSPDNSPVHGMLRQPSITTGVNIPIITELVNDTNVQFLDQDDDDDPDTELYLTQPFACGTAFAVSVLDSLMSATYFNDNILTLIRTLVTGGATPELEALIAEENALRGGYSTPQTLANRDRCRVAQLALLDGPFADLGDGGCYGDLFCKALKTYNMLCFGIYRLRDAHLSTPSQCTKRYVITNPPYEFELVPTDLIFCLMQFDHNAGQSRASLSHSSHSSQSSSKKSSSVHSIPSTANRQNRPKSRESRDKQNATRMNRMGQAEKKWFTDEPDNAYPRNIQIKPMSTHMANQINQYKSTSSLIPPIREVEDEC

SEQ ID NO: 98573 - protein, 62 aa, Homo sapiens
MAFTFAAFCYMLTLVLCASLIFFVIWHIIAFDELRTDFKNPIDQGNPARAVSDTCAVPSASV

SEQ ID NO: 98574 - protein, 461 aa, Homo sapiens
MTMRSAVFKAAAAPAGGNPEQRLDYERAAALGGPEDEPGAAEAHFLPRHRKLKEPGPPLASSQGGSPAPSPAGCGGKGRGLLLPAGAAPGQQEESWGGSVPLPCPPPATKQAGIGGEPAAAGAGCSPRPKYQAVLPIQTGSLVAAAKEPTPWAGDKGGAASPAATASDPAGPPPLPLPGPPPLAPTATAGTLAASEGRWKSMRKSPLGGGGGSGASSQAACLKQILLLQLDLIEQQQQQLQAKEKEIEELKSERDTLLARIERMERRMQLVKKDNEKERHKLFQGYETEEREETELSEKIKLECQPELSETSQTLPPKPFSCGRSGKGHKRKSPFGSTERKTPVKKLAPEFSKVKTKTPKHSPIKEEPCGSLSETVCKRELRSQETPEKPRSSVDTPPRLSTPQKGPSTHPKEKAFSSEIEDLPYLSTTEMYLCRWHQPPPSPLPLRESSPKKEETVASKA

SEQ ID NO: 98575 - protein, 65 aa, Homo sapiens
MEPLLLGRGLIVYLMFLLLKFSKAIEIPSSVQQVPTIIKQSKVQVAFPFDEYFQIECEAKGNPEP

SEQ ID NO: 98576 - protein, 276 aa, Homo sapiens
EPCKKCGLPNHPELILLCDSCDSGYHTACLRPPLMIIPDGEWFCPPCQHKLLCEKLEEQLQDLDVALKKKERAERRKERLVYVGISIENIIPPQEPDFSEDQEEKKKDSKKSKANLLERRSTRTRKCISYRFDEFDEAIDEAIEDDIKEADGGGVGRGKDISTITGHRGKDISTILDEERKENKRPQRAAAARRKKRRRLNDLDSDSNLDEEESEDEFKISDGSQDEFVVSDENPDESEEDPPSNDDSDTDFCSRRLRRHPSRPMRQSRRLRRKTP

SEQ ID NO: 98577 - protein, 37 aa, Homo sapiens
  MOD_RES (1)..(1): Any amino acid
XLDQDVKPEMAMLYPELYKDLTKFAKVAQTAALCVVV

SEQ ID NO: 98578 - protein, 389 aa, Homo sapiens
MAGHTQQPSGRGNPRPAPSPSPVPGTVPGASERVALKKEIGLLSACTIIIGNIIGSGIFISPKGVLEHSGSVGLALFVWVLGGGVTALGSLCYAELGVAIPKSGGDYAYVTEIFGGLAGFLLLWSAVLIMYPTSLAVISMTFSNYVLQPVFPNCIPPTTASRVLSMACLMLLTWVNSSSVRWATRIQDMFTGGKLLALSLIIGVGLLQIFQGHFEELRPSNAFAFWMTPSVGHLALAFLQGSFAFSGWNFLNYVTEEMVDARKNLPRAIFISIPLVTFVYTFTNIAYFTAMSPQELLSSNAVAVTFGEKLLGYFSWVMPVSVALSTFGGINGYLFTYSSAGPQPSSCSWATRTRSSTMCPSSTTSATASPSWACCCCAGGGLHSTGPSR

SEQ ID NO: 98579 - protein, 294 aa, Homo sapiens
MARRGPGWRPLLLLVLLAGAAQGGLYFRRGQTCYRPLRGDGLAPLGRSTYPRPHEYLSPADLPKSWDWRNVDGVNYASITRNQHIPQYCGSCWAHASTSAMADRINIKRKGAWPSTLLSVQNVIDCGNAGSCEGGNDLSVWDYAHQHGIPDETCNNYQAKDQECDKFNQCGTCNEFKECHAIRNYTLWRVGDYGSLSGREKMMAEIYANGPISCGIMATERLANYTGGIYAEYQDTTYINHVVSVAGWGISDGTEYWIVRNSWGEPWGLTLSSRLEYNDTIMAHCSLPSTWDYR

SEQ ID NO: 98580 - protein, 125 aa, Homo sapiens
MAGTLDLDKGCTVEELLRGCIEAFDDSGKVRDPQLVRMFLMMHPWYIPSSQLAAKLLHIYQQSRKDNSNSLQVKTCHLVRYWISAFPAEFDLNPELAEQIKELKALLDQEGNRRHSSLIDIDSVL

SEQ ID NO: 98581 - protein, 93 aa, Homo sapiens
MTSPEIASLSWGQMKVKGSNTTYKDCKVWPGGSRTWDWRETGTEHSPGVQPADVKEVVEKGVQTLVIGRGMSEALKGLTLPPRLECSGTIITH

SEQ ID NO: 98582 - protein, 68 aa, Homo sapiens
PQNIPKRTDVKSQDVAVSPQQQQCSKSYVDRHMESLSQSKSFRRRHNSYSGLVVPSISYELHKKLLSV

SEQ ID NO: 98583 - protein, 180 aa, Homo sapiens
MSDNPPRMEVCPYCKKPFKRLKSHLPYCKMIGPTIPTDQKVYQSKPATLPRAKKMKGPIKDLIKAKGKELETENEERNSKLVVDKPEQTVKTFPLPAVGLERAATTKADKDIKNPIQPSFKMLKNTKPMTTFQEETKAQFYASEKTSPKRELAKDLPKSGESRCNPSEAGASLLVGSIEP

SEQ ID NO: 98584 - protein, 462 aa, Homo sapiens
MAPQVWRRRTLERCLTEVGKATGRPECFLTIQEGLASKFTSLTKVLYDFNKILENGRIHGSPLQKLVIENFDDEQIWQQLELQNEPILQYFQNAVSETINDEDISLLPESEEQEREEDGSEIEADDKEDLEDLEEEEVSDMGNDDPEMGERAENSSKSDLRKSPVFSDEDSDLDFDISKLEQQSKVQNKGQGKPREKSIVDDKFFKLSEMEAYLENIEKEEERKDDNDEEEEDIDFFEDIDSDEDEGGLFGSKKLKSGKSSRNLKYKDFFDPVESDEDITNVHDDELDSNKEDDEIAEEEAEELSISETDEDDDLQENEDNKQHKESLKRVTFALPDDAETEDTGVLNVKKNSDEVKSSFEKRQEKMNEKIASLEKELLEKKPWQLQGEVTAQKRPENSLLEETLHFDHAVRMGMVPSSVVFMSVLFPWFHFIQRFGVVFLFPQLFILKTCKHMAWHGSSHL

SEQ ID NO: 98585 - protein, 36 aa, Homo sapiens
MESGAKGCEVVVSGKLRGQRAKSMKFVDGLMIHSGD

SEQ ID NO: 98586 - protein, 68 aa, Homo sapiens
MILLNNSHKLLALYKSLARSIPESLKVYGSVYHINHGNPFNMEVLVDSWPEYQMVIIRPQKQEMTDDM

SEQ ID NO: 98587 - protein, 78 aa, Homo sapiens
MGEEGTGGTVHLLCLAASSGVPLFCRSSRGGAPARQQLPFSVIGSLNGVHMFGQNLEVQLSSARTENTTVHHPHCSVI

SEQ ID NO: 98588 - protein, 188 aa, Homo sapiens
MATLLSHPQQRPPFLRQAIKIRRRRVRDLQDPPPQMAPETGTTEWFHLKQQHHQPMVQGIPEAGKALLGLVQDVIGDLHQCQRTWDKIFHNTLKIHLFSMAFRELQWLVAKRVQDHTTVVGDVVSPEMGESLFQLYISLKELCQLRMSSSERDGVLALDNFHRWFQPAIPSWLQKTYNEALARVQRAV

SEQ ID NO: 98589 - protein, 81 aa, Homo sapiens
EYLEAIHHLHEEWLIKGSLFPMAAPVLVIRRNVIVWSGLSHSDALRNAEVIEADHHMERMLELFEQNRDRILTPENRKHCP

SEQ ID NO: 98590 - protein, 143 aa, Homo sapiens
MDPLFQQTHKQVHEIQSCMGRLETADKQSVHIVENEIQASIDQIFSRLERLEILSSKEPPNKRQNARLRVDQLKYDVQHLQTALRNFQHRRHAREQQERQREELLSRTFTTNVSQARGEGRPALDRSWGLEFRSLSAICFGGV

SEQ ID NO: 98591 - protein, 48 aa, Homo sapiens
MGKKRVTDHKLNVDKVIKNINTISSELKKIKVMSAANLYRIYHNPGLF

SEQ ID NO: 98592 - protein, 73 aa, Homo sapiens
MSGGGVIRGPAGNNDCRIYVGNLPPDIRTKDIEDVFYKYGAIRDIDLKNRRGGPPFAFVEFEDPRDAEDAVHI

SEQ ID NO: 98593 - protein, 498 aa, Homo sapiens
MAGCRGSLCCCCRWCCCCGERETRTPEELTILGETQEEEDEILPRKDYESLDYDRCINDPYLEVLETMDNKKGRRYEAVKWMVVFAIGVCTGLVGLFVDFFVRLFTQLKFGVVQTSVEECSQKGCLALSLLELLGFNLTFVFLASLLVLIEPVAAGSGIPEVKCYLNGVKVPGIVRLRTLLCKVLGVLFSVAGGLFVEKEGPMIHSGSVVGAGLPQFQSISLRKIQFNFPYFRSDRDKRDFVSAGAAAGVAAAFGAPIGGTLFSLEEGSSFWNQGLTWKVLFCSMSATFTLNFFRSGIQFGSWGSFQLPGLLNFGEFKCSDSDKKCHLWTAMDLGFFVVMGVIGGLLGATFNCLNKRLAKYRMRNVHPKPKLVRVLESLLVSLVTTVVVFVASMVLGECRQMSSSSQIGNDSFQLQVTEDVNSSIKTFFCPNDTYNDMATLFFNPQESAILQLFHQDAPSLWPCSSFSISCLHVGLTAFLFQVAFLCLLCCVELLLDV

SEQ ID NO: 98594 - protein, 167 aa, Homo sapiens
MLPDDTTNHSNSSKEVPSSAVLRSLRVNVGPDGEETRAQTVQKSPEFLSTSESSSLLQDLQPSDSTSFILLNLTRAGLGSSAEHLVFVQDEAEDSGNDFLSSESTDSSIPWFLRVQELAHDSLIAATRAQLAKNAKTSSNGEARRHFPCHYSVQRDFGNAVAGLSCI

SEQ ID NO: 98595 - protein, 103 aa, Homo sapiens
MADPHQLFDDTSSAQSRGYGAQRAPGGLSYPAASPTPHAAFLADPVSNMAMAYGSSLAAQGKELVDKNIDRFIPITKLKYYFAVDTMYVGRKLGLLFFPYLHQ

SEQ ID NO: 98596 - protein, 88 aa, Homo sapiens
MGITNFEDMKAISRHTQELLEIEEPLFKRSISLPYRDIIGLYLEQKGHTGIKSDSLTLSEFVKAAGLQDYAPEITAPEENEELPCTEP

SEQ ID NO: 98597 - protein, 143 aa, Homo sapiens
MSGMFLSSKLTTILLLFTNKSLDPGQKIQENTLLSVYGNSSWHFDEVRNQCYFHQFMKEQPDLNFRNPDVQEEIKEILRFWLTKGVDGFSLDAVKFLLEAKHLRDEIQVNKTQIPDTVTQYSELYHDFTTTQVGMHDIVRSFR

SEQ ID NO: 98598 - protein, 163 aa, Homo sapiens
MELRWPGQGLVVMIMVDHFGFNTVKTFNQRYLVADKYWKKNGGSILFYTGNEGDIIWFCNNTGFMWDVAEELKAMLVFAEHRYYGESLPFGDNSFKDSRHLNFLTSEQALADFAELIKHLKRTIPGAENQPVIAIGGSYGGMLAAWFRMKYPHMVVGALAASA

SEQ ID NO: 98599 - protein, 112 aa, Homo sapiens
RTAMPEPRGSSQLRVNAAFAARYNRYREREELQRLKDRYGDRDSSSDSSSESDSSDERVEFDPQQERDFYKTLSLLKKKDPRIYQKDATFYNRTVRRTQKPWRSRRKCGPCT

SEQ ID NO: 98600 - protein, 603 aa, Homo sapiens
MADEGKSYSVSTSFFKSPTQFSSNFSLMLPSHREGSFLWIGSGVCMEMASVVKHDDERVNFPQRKKKGRGPFRWKYGEGNRRSGRGGSGIRSSRLEEDDGDVAMSDAQDGPRVRYNPYTTRPNRRGDTWHDRDRIHVTVRRDRAPPERGGAGTSQDGTSKNWFKITIPYGRKYDKAWLLSMIQSKCSVPFTPIEFHYENTRAQFFVEDASTASALKAVNYKILDRENRRISIIINSSAPPHTILNELKPEQVEQLKLIMSKRYDGSQQALDLKGLRSDPDLVAQNIDVVLNRRSCMAATLRIIEENIPELLSLNLSNNRLYRLDDMSSIVQKAPNLKILNLSGNELKSERELDKIKGLKLEELWLDGNSLCDTFRDQSTYISAIRERFPKLLRLDGHELPPPIAFDVEAPTTLPPCKGSYFGTENLKSLVLHFLQQYYAIYDSGDRQGLLDAYHDGACCSLSIPFIPQNPARSSLAEYFKDSRNVKKLKDPTLRFRLLKHTRLNVVAFLNELPKTQHDVNSFVVDISAQTSTLLCFSVNGVFKEVDGKSRDSLRAFTRTFIAVPASNSGLCIVNDELFVRNASSEEIQRAFAMPAPTPSSSPV

SEQ ID NO: 98601 - protein, 203 aa, Homo sapiens
MGLPEERVRSGSGSRGQEEAGAGGRARSWSPPPEVSRSAHVPSLQRYRELHRRSVEEPREFWGDIAKEFYWKTPCPGPFLRYNFDVTKGKIFIEWMKGATTNICYNVLDRNVHEKKLGDKVAFYWSTSGNSSYRYTCREGNEPGETTQITYHQLLVQVCQFSNVLRKQGIQKGDRVAIYMPMIPELVVAMLACARIGALHSIV

SEQ ID NO: 98602 - protein, 279 aa, Homo sapiens
MGKGNEDPDLHCSSIQCSTDQPPFQQISFTEKGSDEKKPFKEKGKTAFSHSSEKHIQRQAGSEPNPNKENSEETKLKAGNSTAGSEPESSSYRENCRKRKMSSKDSCQDTAGNCPEKECSLSLNKKSRSSTPVHNSEIQETCDAHHRGRSRACTGRSKRHRSRALGVQTPSIRKSLVTSVRAMSEAVYQDLAQVWAQQIHSPLTCEQLTLLTRLRGPLCAQVQTLYSMATQAAYVFPAESWLVPATLPGPGESALDREAHPFPGQEITETVSGSDEAKL

SEQ ID NO: 98603 - protein, 198 aa, Homo sapiens
MAAQGEPQLVLVGDGGTGKTTFVKRHLTGEFEKKYVATLGVEVHPLVFHTNRGPIKFNVWDTAGQEKFGGLRDGYYIQAQCAIIMFDVTSRVTYKNVPNWHRDLVRVCENIPIVLCGNKVDIKDRKVKAKSIVFHRKKNLQYYDISAKSNYNFEKPFLWLARKLIGDPNLEFVAMPALAPPEVVMDPALAAQYEHDLE

SEQ ID NO: 98604 - protein, 129 aa, Homo sapiens
MSINGKLQDGSMEIDAGNNLETFKMGSGAEEAIAVNDFQNGITGIRFAGGEKCYIKAQVKARIPEVGAVTKQSISSKLEGKIMPVKYEENSLIWVAVDQPVKDNSFLSSKVLELCGDLPIFWLKPTYPK

SEQ ID NO: 98605 - protein, 105 aa, Homo sapiens
MAAARLCLSLLLLSTCVALLLQPLLGAQGAPLEPVYPGDNATPEQMAQYAADLRRYINMLTRPSACPCCLFPPRYGKRHKEDTLAFSEWGSPHAAVPRELSPLDL

SEQ ID NO: 98606 - protein, 220 aa, Homo sapiens
  MOD_RES (1)..(1): Any amino acid
XGSRGSPASGPGPRRVQRRAWPPDKEQEKEKKSVICVEGNIASGKTTCLEFFSNATDVEVLTEPVSKWRNVRGHNPLGLMYHDASRWGLTLQTYVQLTMLDRHTRPQVSSVRLMERSIHSARYIFVENLYRSGKMPEVDYVVLSEWFDWILRNMDVSVDLIVYLRTNPETCYQRLKKRCREEEKVIPLVIEADHHMERMLELFEQNRDRILTPENRKHCP

SEQ ID NO: 98607 - protein, 228 aa, Homo sapiens
TEEEEKIKSQGQDVTSSVYFMKQTISNACGTIGLIHAIANNKDKMHFESGSTLKKFLEESVSMSPEERARYLENYDAIRVTHETSAHEGQTESSSPSSSQPHSSHCRTKASSLCHHASLPWVKRNHVGPAKATSPSLRLRRWRPFLRLPSLGLHSVAPSIDEKVDLHFIALVHVDGHLYELDGRKPFPINHGETSDETLLEDAIEVCKKFMERDPDELRFNAIALSAA

SEQ ID NO: 98608 - protein, 720 aa, Homo sapiens
MSSTRSQNPHGLKQIGLDQIWDDLRAGIQQVYTRQSMAKSRYMELYTHVYNYCTSVHQSNQARGAGVPPSKSKKGQTPGGAQFVGLELYKRLKEFLKNYLTNLLKDGEDLMDESVLKFYTQQWEDYRFSSKVLNGICAYLNRHWVRRECDEGRKGIYEIYSLALVTWRDCLFRPLNKQVTNAVLKLIEKERNGETINTRLISGVVQSYEARLLEEQRRVQVYLHESTQDELARKCEQVLIEKHLEIFHTEFQNLLDADKNEDLGRMYNLVSRIQDGLGELKKLLETHIHNQGLAAIEKCGEAALNDPKMYVQTVLDVHKKYNALVMSAFNNDAGFVAALDKACGRFINNNAVTKMAQSSSKSPELLARYCDSLLKKSSKNPEEAELEDTLNQVMVVFKYIEDKDVFQKFYAKMLAKRLVHQNSASDDAEASMISKLKQACGFEYTSKLQRMFQDIGVSKDLNEQFKKHLTNSEPLDLDFSIQVLSSGSWPFQQSCTFALPSELERSYQRFTAFYASRHSGRKLTWLYQLSKGELVTNCFKNRYTLQASTFQMAILLQYNTEDAYTVQQLTDSTQIKMDILAQVLQILLKSKLLVLEDENANVDEVELKPDTLIKLYLGYKNKKLRVNINVPMKTEQKQEQETTHKNIEEDRKLLIQAAIVRIMKMRKVLKHQQLLGEVLTQLSSRFKPRVPVIKKCIDILIEKEYLERVDGEKDTYSYLA

SEQ ID NO: 98609 - protein, 221 aa, Homo sapiens
AENDENGQAENFSMDPQLERQVETIRNLVDSYMSIINKCIRDLIPKTIMHLMINNVKDFINSELLAQLYSSEDQNTLMEESAEQAQRRDEMLRMYQALKEALGIIGDISTATVSTPAPPPVDDSWIQHSRRSPPPSPTTQRRPTLSAPLARPTSGRGPAPAIPSPGPHSGAPPVPFRPGPLPPFPSSSDSFGAPPQVPSRPTRAPPSVPRRPPPAVPGRPS

SEQ ID NO: 98610 - protein, 1075 aa, Homo sapiens
EQILTEVPITPETTCRDVVEFCKEPGEGSCHLAEVWRGNERPIPFDHMMYEHLQKWGPRREEVKFFLRHEDSPTENSEQGGRQTQEQRTQRNVINVPGEKRTENGVGNPRVELTLSELQDMAARQQQQIENQQQMLVAKRLHFLKQQERRQQQSISENEKLQKLKERVEAQENKLKKIRAMRGQVDYSKIMNGNLSAEIERFSAMFQEKKQEVQTAILRVDQLSQQLEDLKKGKLNGFQSYNGKLTGPAAVELKRLYQELQIRNQLNQEQNSKLQQQKELLNKRNMEVAMMDKRISELRERLYGKKIQLNRVNGTSSPQSPLSTSGRVAAVGPYIQVPSAGSFPVLGDPIKPQSLSIASNAAHGRSKSANDGNWPTLKQNSSSSVKPVQVAGADWKDPSVEGSVKQGTVSSQPVPFSALGPTEKPGIEIGKVPPPIPGVGKQLPPSYGTYPSPTPLGPGSTSSLERRKEGSLPRPSAGLPSRQRPTLLPATGSTPQPGSSQQIQQRISVPPSPTYPPAGPPAFPAGDSKPELPLTVAIRPFLADKGSRPQSPRKGPQTVNSSSIYSMYLQQATPPKNYQPAAHSALNKSVKAVYGKPVLPSGSTSPSPLPFLHGSLSTGTPQPQPPSESTEKEPEQDGPAAPADGSTVESLPRPLSPTKLTPIVHSPLRYQSDADLEALRRKLANAPRPLKKRSSITEPEGPGGPNIQKLLYQRFNTLAGGMEGTPFYQPSPSQDFMGTLADVDNGNTNANGNLEELPPAQPTAPLPAEPAPSSDANDNELPSPEPEELICPQTTHQTAEPAEDNNNNVATVPTTEQIPSPVAEAPSPGEEQVPPAPLPPASHPPATSTNKRTNLKKPNSERTGHGLRVRFNPLALLLDASLEGEFDLVQRIIYEVEDPSKPNDEGITPLHNAVCAGHHHIVKFLLDFGVNVNAADSDGWTPLHCAASCNSVHLCKQLVESGAAIFASTISDIETAADKCEEMEEGYIQCSQFLYGVQEKLGVMNKGVAYALWDYEAQNSDELSFHEGDALTILRRKDESETEWWWARLGDREGYVPKNLLGLYPRIKPRQRTLA

SEQ ID NO: 98611 - protein, 152 aa, Homo sapiens
  MOD_RES (1)..(1): Any amino acid
XEPQMRSILLDWLLEVCEVYTLHRETFYLAQDFFDRFMLTQKDINKNMLQLIGITSLFIASKLEEIYAPKLQEFAYVTDGACSEEDILRMELIILKALKWELCPVTIISWLNLFLQVDALKDAPKVLLPQYSQETFIQIAQLFSHFSYLLDQ

SEQ ID NO: 98612 - protein, 97 aa, Homo sapiens
MLTFFLVSGGSLWLFVGHSEVSCLLCLLLLLPGQFHDLSQRHAWHLGFMKILCGPNEYQFPLAPEADKTYLPWISGDLWSIHQPTCWFKINSKVVLS

SEQ ID NO: 98613 - protein, 251 aa, Homo sapiens
MGEFNEKKTTCGTVCLKYLLFTYNCCFWLAGLAVMAVGIWTLALKSDYISLLASGTYLATAYILVVAGTVVMVTGVLGCCATFKERRNLLRLYFILLLIIFLLEIIAGILAYAYYQQLNTELKENLKDTMTKRYHQPGHEAVTSAVDQLQQEFHCCGSNNSQDWRDSEWIRSQEAGGRVVPDSCCKTVVALCGQRDHASNIYKGGCITKLETFIQEHLRVIGAVGIGIACVQVFGMIFTCCLYRSLKLEHY

SEQ ID NO: 98614 - protein, 1191 aa, Homo sapiens
MLHTNTRIGDGTFFKIPGKSGLYALKKEESSCPADGTLDLVCESELDGTDMAEANAHGEENGVCSKQVTDEASSTRDSSLTNTAVQSKLVSSFQQHTKKALKQALRQQQKRRNGVSMMVNKTVPRVVLTPLKVSDEQSDSPSGSESKNGEADSSDKEMKHGQKSPTGKQTSQHLKRLKKSGLGHLKWTKAEDIDIETPGSILVNTNLRALINKHTFASLPQHFQQYLLLLLPEVDRQMGSDGILRLSTSALNNEFFAYAAQGWKQRLAEGEFTPEMQLRIRQEIEKEKKTEPWKEKFFERFYGEKLGMSREESVKLTTGPNNAGAQSSSSCGTSGLPVSAQTALAEQQPKSMKSPASPEPGFCATLCPMVEIPPKDIMAELESEDILIPEESVIQEEIAEEVETSICECQDENHKTIPEFSEEAESLTNSHEEPQIAPPEDNLESCVMMNDVLETLPHIEVKIEGKSESPQEEMTVVIDQLEVCDSLIPSTSSMTHVSDTEHKESETAVETSTPKIKTGSSSLEGQFPNEGIAIDMELQSDPEEQLSENACISETSFSSESPEGACTSLPSPGGETQSTSEESCTPASLETTFCSEVSSTENTDKYNQRNSTDENFHASLMSEISPISTSPEISEASLMSNLPLTSEASPVSNLPLTSETSPMSDLPLTSETSSVSSMLLTSETTFVSSLPLPSETSPISNSSINERMAHQQRKSPSVSEEPLSPQKDESSATAKPLGENLTSQQKNLSNTPEPIIMSSSSIAPEAFPSEDLHNKTLSQQTCKSHVDTEKPYPASIPELASTEMIKVKNHSVLQRTEKKVLPSPLELSVFSEGTDNKGNELPSAKLQDKQYISSVDKAPFSEGSRNKTHKQGSTQSRLETSHTSKSSEPSKSPDGIRNESRDSEISKRKTAEQHSFGICKEKRARIEDDQSTRNISSSSPPEKEQPPREEPRVPPLKIQLSKIGPPFIIKSQPVSKPESRASTSTSVSGGRNTGARTLADIKARAQQARAQREAAAAAAVAAAASIVSGAMGSPGEGGKTRTLAHIKEQTKAKLFAKHQARAHLFQTSKETRLPPPLSSKEGPPNLEVSSTPETKMEGSTGVIIVNPNCRSPSNKSAHLRETTTVLQQSLNPSKLPETATDLSVHSSDENIPVSHLSEKIVSSTSSENSSVPMLFNKNSVPVSVCSTAISG

SEQ ID NO: 98615 - protein, 69 aa, Homo sapiens
MVPEPKIIDAALRACRRLNDFASTVRILEVVKDKAGPHKEIYPYVIQELRPTLNELGISTPEELGLDKV

SEQ ID NO: 98616 - protein, 194 aa, Homo sapiens
MLSSTLRVAVVCVSNVNRSMEAHSILRKKGLSVRSFGTESHVRLPGPRPNRPVVYDFATTYKEMYNDLLRKDRECYTRNGILHILGRNERIKPGPERFQECTDFFDVIFTCEESVYDTVVEDLCSREQQTFQPVHVINMEIQDTLEDATLGAFLICEICQCLQQSDDMEDNLEELLLQMEEKAGKSFLHTVCFY

SEQ ID NO: 98617 - protein, 203 aa, Homo sapiens
MDMLFIKGKYKSALQVLIEMKNQDVKFTKDTYVLAFAICYKLNSPESFKICTTLREEALLKGEILSRRASCFAVALALNQNEMAKAVSIFSQIMNPESIACINLNIIIHIQSNMLENLIKTLKNAAEGNLSKFVKRHVFSEEVLAKVREKVKDVPALVAKFDEIYGTLHITGQVTTDSLDAVLCHTPRDRKSHTLLLNKRMVS

SEQ ID NO: 98618 - protein, 811 aa, Homo sapiens
  MOD_RES (1)..(1): Any amino acid
XAGWDKRYCEAGFSSVVTQAGELVLGAPGGYYFLGLLAQAPVADIFSSYRPGILLWHVSSQSLSFDSSNPEYFDGYWGYSVAVGEFDGDLNTTEYVVGAPTWSWTLGAVEILDSYYQRLHRLRGEQMASYFGHSVAVTDVNGDGRHDLLVGAPLYMESRADRKLAEVGRVYLFLQPRGPHALGAPSLLLTGTQLYGRFGSAIAPLGDLDRDGYNDIAVAAPYGGPSGRGQVLVFLGQSEGLRSRPSQVLDSPFPTGSAFGFSLRGAVDIDDNGYPDLIVGAYGANQVAVYRAQPVVKASVQLLVQDSLNPAVKSCVLPQTKTPVSCFNIQMCVGATGHNIPQKLSLNAELQLDRQKPRQGRRVLLLGSQQAGTTLNLDLGGKHSPICHTTMAFLRDEADFRDKLSPIVLSLNVSLPPTEAGMAPAVVLHGDTHVQEQTRIVLDCGEDDVCVPQLQLTASVTGSPLLVGADNVLELQMDAANEGEGAYEAELAVHLPQGAHYMRALSNVEGFERLICNQKKENETRVVLCELGNPMKKNAQIGIAMLVSVGNLEEAGESVSFQLQIRSKNSQNPNSKIVLLDVPVRAEAQVELRGNSFPASLVVAAEEGEREQNSLDSWGPKVEHTYELHNNGPGTVNGLHLSIHLPGQSQPSDLLYILDIQPQGGLQCFPQPPVNPLKVDWGLPIPSPSPIHPAHHKRDRRQIFLPEPEQPSRLQDPVLVSCDSAPCTVVQCDLQEMARGQRAMVTVLAFLWLPSLYQRPLDQFVLQSHAWFNVSSLPYAVPPLSLPRGEAQVGFFKRNRPPLEEDDEEGE

SEQ ID NO: 98619 - protein, 166 aa, Homo sapiens
MKTIEVDGIKVRIQIWDTAGQERYQTITKQYYRRAQGIFLVYDISSERSYQHIMKWVSDVDEYAPEGVQKILIGNKADEEQKRQVGREQGQQLAKEYGMDFYETSACTNLNIKESFTRLTELVLQAHRKELEGLRMRASNELALAELEEEEGKPEGPANSSKTCWC

SEQ ID NO: 98620 - protein, 22 aa, Homo sapiens
MAGQGLPLHVATLLTGLLECLG

SEQ ID NO: 98621 - protein, 335 aa, Homo sapiens; identical to SEQ ID NO: 45998

SEQ ID NO: 98622 - protein, 272 aa, Homo sapiens
MGRSRPPGYAHWKGQVLNSDELQELYEGLRLNNMNKYDYVLTGYTRDKSFLAMVVDIVQELKQQNPRLVYVCDPVLGDKWDGEGSMYVPEDLLPVYKEKVVPLADIITPNQFEAELLSGRKIHSQEEALRVMDMLHSMGPDTVVITSSDLPSPQGSNYLIVLGSQRRRNPAGSVVMERIRMDIRKVDAVFVGTGDLFAAMLLAWTHKHPNNLKVACEKTVSTLHHVLQRTIQCAKAQAGEGVRPSPMQLELRMVQSKRDIEDPEIVVQATVL

SEQ ID NO: 98623 - protein, 140 aa, Homo sapiens
MGRTVVVLGGGISGLAASYHLSRAPCPPKVMLGGSWLQTLEASGCVLSQELFQQRAQEAAATQLGLKEMPSHCLVHLHKNCIPQYTLGHWQKLESARQFLTAHRLPLTLAGASYEGVAVNDCIESGRQAAVSVLGTEPNS

SEQ ID NO: 98624 - protein, 60 aa, Homo sapiens
  MOD_RES (1)..(1): Any amino acid
XRALADMNNDGRMDQVEFSIAMKLIKLKLQGYQLPSALPPVMKQQPVAISSAPAFGGNSV

SEQ ID NO: 98625 - protein, 182 aa, Homo sapiens
MEGPLLEGLYWDSWYNNQQLYNLKNSSRIYYENILLGVPRVRQLKVRNNTCKVYSSFQSLMSECYGKYTSANEDLSNFGLQINTEWRYSTSNTNSPWHWGFLGVYRNGGYIFTLSKSKSETKNKFIDLRLNSWITRGTRVIFIDFSLYNANVNLFCIIRLVAEFPATGGILTSWQFYSVKLL

SEQ ID NO: 98626 - protein, 350 aa, Homo sapiens
MMTSVGTNRARGNWEQPQNQNQTQHKQRPQATAEQIRLAQMISDHNDADFEEKVKQLIDITGKNQDECVIALHDCNGDVNRAINVLLEGNPDTHSWEMVGKKKGVSGQKDGGQTESNEEGKENRDRDRDYSRRRGGPPRRGRGASRGRECMHGALSKPAVVRGQENGLDGTKSGGPSGRGTERGRRGRGRGRGGSGRRGGRFSAQGMGTFNPADYAEPANTDDNYGNSSGNTWNNTGHFEPDDGTSAWRTATEEWGTEDWNEDLSETKIFTASNVSSVPLPAENVTITAGQRIDLAVLLGKTPSTMENDSSNLDPSQAPSLAQPLVFSNSKQTAISQPASGNTFSHHSMV

SEQ ID NO: 98627 - protein, 242 aa, Homo sapiens
MPKRGKKGAVAEDGDELRTEPEAKKSKTAAKKNDKEAAGEGPALYEDPPDQKTSPSGKPATLKICSWNVDGLRAWIKKKGLDWVKEEAPDILCLQETKCSENKLPAELQELPGLSHQYWSAPSDKEGYSGVGLLSRQCPLKVSYGIGRGLVRLEYRQRWDEAFRKFLKGLASRKPLVLCGDLNVAHEEIDLRNPKGNKKNAGFTPQERQGFGELLQAVPLADSFRHLYPNTPYAYTFWTYMM

SEQ ID NO: 98628 - protein, 80 aa, Homo sapiens
QPGPWEYHSAVLTSQTPEEICANIIREKLLEHLPQEVPYNVQQKTAVWEEGPGGELVIQQKLLVPKESYVGIPAQAAGRN

SEQ ID NO: 98629 - protein, 115 aa, Homo sapiens
MLREEAAQKRKGKEPGMALPQGRLTFRDVAIEFSLAEWKCLNPSQRALYREVMLENYRNLEAVDISSKCMMKEVLSTGQGNTEVIHTGTLQRHESHHIGDFCFQEIEKEIHDIEF

SEQ ID NO: 98630 - protein, 52 aa, Homo sapiens
MPVQAVCPYCGNRIITVTTFVPGALTWLLCTTLFLFGPLPDSAWVPGASSVQ

SEQ ID NO: 98631 - protein, 66 aa, Homo sapiens
MIARRNPEPLRFLPDEARSLPPPKLTDPRLLYIGFLGYCSGLIDNLIRRRPIATADVYCCGAERRG

SEQ ID NO: 98632 - protein, 191 aa, Homo sapiens
MTPSNMAIVLGPNLLWPQAEGNITEMMTTVSLQIVGIIEPIIQHADWFFPGEIEFNITGNYGSPVHVNHNANYSSMPSPDMDPADRRQPEQARRPLSVATDNMMLEFYKKDGLRKIQSMGVRVMDTNWVARRGSSAGRKVSCAPPSMQPPAPPAELAAPLPSPLPEQPLDSPAAPALSPSGLGLQPGPERT

SEQ ID NO: 98633 - protein, 109 aa, Homo sapiens
  MOD_RES (1)..(1): Any amino acid
XQELANNLHVRLKWCCFVMLHADQDGEKLQALLRLVIELLERVKIVEALSTVPQMYCLAVVEVVRRKMFIKHYREWAGALVKDGKRLYEAEKSKRESFGKLFNSKASKV

SEQ ID NO: 98634 - protein, 121 aa, Homo sapiens
MEPLLPPKRRLLPRVRLLPLLLALAVGSAFYTIWSGWHRRTEELPLGRELRVPLIGSLPEARLRRVVGQLDPQRLWSTYLRPLLVVRTPGSPGNLQVRKGPRIRLCPVPCCWSWPKHLTWS

SEQ ID NO: 98635 - protein, 21 aa, Homo sapiens
MQLAARIRPRDLEDFFSAVGK

SEQ ID NO: 98636 - protein, 1790 aa, Homo sapiens
  MOD_RES (1)..(1): Any amino acid
XPRHVKLLSTKMGLKVTWDPPKDATSRPVEHYNIAYGKSLKSLKYIKVNAETYSFLIEDVEPGVVYFVLLTAENHSGVSRPVYRAESPPGGEWIEIDGFPIKGPGPFNETVTEKEVPNKPLRVRVRSSDDRLSVAWKAPRLSGAKSPRRSRGFLLGYGESGRKMNYVPLTRDERTHEIKKLASESVYVVSLQSMNSQGRSQPVYRAALTKRKISEEDELDVPDDISVRVMSSQSVLVSWVDPVLEKQKKVVASRQYTVRYREKGELARWDYKQIANRRVLIENLIPDTVYEFAVRISQGERDGKWSTSVFQRTPESAPTTAPENLNVWPVNGKPTVVAASWDALPETEGKVKASKADVEQNTEDNGKPEKPEPSSPSPRAPASSQHPSVPASPQGRNAKDLLLDLKNKILANGGAPRKPQLRAKKAEELDLQSTEITGEEELGSREDSPMSPSDTQDQKRTLRPPSRHGHSVVAPGRTAVRARMPALPRREGVDKPGFSLATQPRPGAPPSASASPAHHASTQGTSHRPSLPASLNDNDLVDSDEDERAVGSLHPKGAFAQPRPALSPSRQSPSSVLRDRSSVHPGAKPASPARRTPHSGAAEEDSSASAPPSRLSPPHGGSSRLLPTQPHLSSPLSKGGKDGEDAPATNSNAPSRSTMSSSVSSHLSSRTQVSEGAEASDGESHGDGDREDGGRQAEATAQTLRARPASGHFHLLRHKPFAANGRSPSRFSIGRGPRLQPSSSPQSTVPSRAHPRVPSHSDSHPKLSSGIHGDEEDEKPLPATVVNDHVPSSSRQPISRGWEDLRRSPQRGASLHRKEPIPENPKSTGADTHPQGKYSSLASKAQDVQQSTDADTEGHSPKAQPGSTDRHASPARPPAARSQQHPSVPRRMTPGRAPQQQPPPPVATSQHHPGPQSRDAGRSPSQPRLSLTQAGRPRPTSQGRSHSSSDPYTASSRGMLPTALQNQDEDAQGSYDDDSTEVEAQDVRAPAHAARAKEAAASLPKHQQVESPTGAGAGGDHRSQRGHAASPARPSRPGGPQSRARVPSRAAPGKSEPPSKRPLSSKSQQSVSAEDDEEEDAGFFKGGKEDLLSSSVPKWPSSSTPRGGKDADGSLAKEEREPAIALAPRGGSLAPVKRPLPPPPGSSPRASHVPSRLPPRSAATVSPVAGTHPWPQYTTRAPPGHFSTTPMLSLRQRMMHARFRNPLSRQPARPSYRQGYNGRPNVEGKVLPGSNGKPNGQRIINGPQGTKWVVDLDRGLVLNAEGRYLQDSHGNPLRIKLGGDGRTIVDLEGTPVVSPDGLPLFGQGRHGTPLANAQDKPILSLGGKPLVGLEVIKKTTHPPTTTMQPTTTTTPLPTTTTPRPTTATTRRTTTTRRTTTRRPTTTVRTTTRTTTTTTPTPTTPIPTCPPGTLERHDDDGNLIMSSNGIPECYAEEDEFSGLETDTAVPTEEAYVIYDEDYEFETSRPPTTTEPSTTATTPRVIPEEGAISSFPEEEFDLAGRKRFVAPYVTYLNKDPSAPCSLTDALDHFQVDSLDEIIPNDLKKSDLPPQHAPRNITVVAVEGCHSFVIVDWDKATPGDVVTGYLVYSASYEDFIRNKWSTQASSVTHLPIENLKPNTRYYFKVQAQNPHGYGPISPSVSFVTESDNPLLVVRPPGGEPIWIPFAFKHDPSYTDCHGRQYVKRTWYRKFVGVVLCNSLRYKIYLSDNLKDTFYSIGDSWGRGEDHCQFVDSHLDGRTGPQSYVEALPTIQGYYRQYRQEPVRFGNIGFGTPYYYVGWYECGVSIPGKW

SEQ ID NO: 98637 - protein, 1262 aa, Homo sapiens
MATAATEEPFPFHGLLPKKETGAASFLCRYPEYDGRGVLIAVLDTGVDPGAPGMQVTTDGKPKIVDIIDTTGSGDVNTATEVEPKDGEIVGLSGRVLKIPASWTNPSGKYHIGIKNGYDFYPKALKERIQKERKEKIWDPVHRVALAEACRKQEEFDVANNGSSQANKLIKEELQSQVELLNSFEKKYSDPGPVYDCLVWHDGEVWRACIDSNEDGDLSKSTVLRNYKEAQEYGSFGTAEMLNYSVNIYDDGNLLSIVTSGGAHGTHVASIAAGHFPEEPERNGVAPGAQILSIKIGDTRLSTMETGTGLIRAMIEVINHKCDLVNYSYGEATHWPNSGRICEVINEAVWKHNIIYVSSAGNNGPCLSTVGCPGGTTSSVIGVGAYVSPDMMVAEYSLREKLPANQYTWSSRGPSADGALGVSISAPGGAIASVPNWTLRGTQLMNGTSMSSPNACGGIALILSGLKANNIDYTVHSVRRALENTAVKADNIEVFAQGHGIIQVDKAYDYLVQNTSFANKLGFTVTVGNNRGIYLRDPVQVAAPSDHGVGIEPVFPENTENSEKISLQLHLALTSNSSWVQCPSHLELMNQCRHINIRVDPRGLREGLHYTEVCGYDIASPNAGPLFRVPITAVIAAKVNESSHYDLAFTDVHFKPGQIRRHFIEVPEGATWAEVTVCSCSSEVSAKFVLHAVQLVKQRAYRSHEFYKFCSLPEKGTLTEAFPVLGGKAIEFCIARWWASLSDVNIDYTISFHGIVCTAPQLNIHASEGINRFDVQSSLKYEDLAPCITLKNWVQTLRPVSAKTKPLGSRDVLPNNRQLYEMVLTYNFHQPKSGEVTPSCPLLCELLYESEFDSQLWIIFDQNKRQMGSGDAYPHQYSLKLEKGDYTIRLQIRHEQISDLERLKDLPFIVSHRLSNTLSLDIHENHSFALLGKKKSSNLTLPPKYNQPFFVTSLPDDKIPKGAGPGCYLAGSLTLSKTELGKKAGQSAAKRQGKFKKDVIPVHYYLIPPPTKTKNGSKDKEKDSEKEKDLKEEFTEALRDLKIQWMTKLDSSDIYNELKETYPNYLPLYVARLHQLDAEKERMKRLNEIVDAANAVISHIDQTALAVYIAMKTDPRPDAATIKNDMDKQKSTLVDALCRKGCALADHLLHTQAQDGAISTDAEGKEEEGESPLDSLAETFWETTKWTDLFDNKVLTFAYKHALVNKMYGRGLKFATKLVEEKPTKENWKNCIQLMKLLGWTHCASFTENWLPIMYPPDYCVF

SEQ ID NO: 98638 - protein, 123 aa, Homo sapiens
  MOD_RES (1)..(1): Any amino acid
XLSATTFSTQSPLQKLFARKMKILGTIQILFGIMTFSFGVIFLFTLLKPYPRFPFIFLSGYPFWGSVLFINSGAFLIAVKRKTTETLGILITLMTFSIIELFISLPFSILGCHSEDCDCEQCC

SEQ ID NO: 98639 - protein, 568 aa, Homo sapiens
MSGGASATGPRRGPPGLEDTTSKKKQKDRANQESKDGDPRKETGSRYVAQAGLEPLASGDPSASASHAAGITGSRHRTRLFFPSSSGSASTPQEEQTKEELLLDWRQSAEEVIVKLRVGVGPLQLEDVDAAFTDTDCVVRFAGGQQWGGVFYAEIKSSCAKVQTRKGSLLHLTLPKKVPMLTWPSLLKKPLGTQELVPGLRCQENGQELSPIALEPGPEPHRAKQEARNQKRAQGRGEVGAGAGPGAQAGPSAKRAVHLCRGPEGDGSRDDPGPRGDAPPFVADPATQVEADEQLCIPPLNSQTCLLGSEENLAPLAGEKAVPPGNDPVSPAMVRSRNPGKDDCAKEEMAVAADAATLVDEPESMVNLAFVKNDSYEKGPDSVVVHVYVKEICRDTSRVLFREQDFTLIFQTRDGNFLRLHPGCGPHTTFRWQVKLRNLIEPEQCTFCFTASRIDICLRKRQSQRWGGLEAPAARGAVGGAKVAVPTGPTPLDSTPPGGAPHPLTGQEEARAVEKDKSKARSEDTGLDSVATRTPMEHVTPKPETHLASPKPTCMVPPMPHSPVSGDS

SEQ ID NO: 98640 - protein, 274 aa, Homo sapiens
MTARTLSLMASLVAYDDSDSEAETEHAGSFNATGQQKDTSGVARPPGQDFASGTLDVPKAGAQPTKHGSCEDPGGYRLPLAQLGRSDWGSCPSQRLQWPGKEPQVTFPIKEPSCSSLWTSHVPASHMPLAAARFKQVKLSRNFPKSSFHAQSESETVGKNGSSFQKKKCEDCVVPYTPRRLRQRQALSTETGKGKDVEPQGPPAGRAPAPLYVGPGVSEFIQPYLNSHYKETTVPRKVLFHLRGHRGPVNTIQWCPVLSKSHMLLSTSMDKTFK

SEQ ID NO: 98641 - protein, 75 aa, Homo sapiens
MFWKFDLHSSSHIDTLLEREDVTLKELMDEEDVLQECKAQNRKLIEFLLKAECLEDLVSFIIEEPPQDMDEKIRY

SEQ ID NO: 98642 - protein, 573 aa, Homo sapiens
MAAEEADVDIEGDVVAAAGAQPGSGENTASVLQKDHYLDSSWRTENGLIPWTLDNTISEENRAVIEKMLLEEEYYLSKKSQPEKVWLDQKEDDKKYMKSLQKTAKIMVHSPTKPASYSVKWTIEEKELFEQGLAKFGRRWTKISKLIGSRTVLQVKSYARQYFKNKVKCGLDKETPNQKTGHNLQVKNEDKGTKAWTPSCLRGRADPNLNAVKIEKLSDDEEVDITDEVDELSSQTPQKNSSSDLLLDFPNSKMHETNQGEFITSDSQEALFSKSSRGCLQNEKQDETLSSSEITLWTEKQSNGDKKSIELNDQKFNELIKNCNKHDGRGIIVDARQLPSPEPCEIQKNLNDNEMLFHSCQMVEESHEEEELKPPEQEIEIDRNIIQEEEKQAIPEFFEGRQAKTPERYLKIRNYILDQWEICKPKYLNKTSVRPGLKNCGDVNCIGRIHTYLELIGAINFGCEQAVYNRPQTVDKVRIRDRKDAVEAYQLAQRLQSMRTRRRRVRDPWGNWCDAKDLEGQTFEHLSAEELAKRREEEKGRPVKSLKVPRPTKSSFDPFQLIPCNFFSEEKQA

SEQ ID NO: 98643 - protein, 64 aa, Homo sapiens
MAESVERLQQRVQELERELAQERSLQVPRSGDGGGGRVRIEKMSSEVVDSNPYSCYSLIMTRWN

SEQ ID NO: 98644 - protein, 212 aa, Homo sapiens
MEVQKHSVHTLVFRSLKRTHDMFVADNGKPVPLDEESHKRKMAIKLRNEYGPVLHMPTSKENLKEKGPQNATDSYVHKQYPANQGQEVEYFVAGTHPYPPGPGVALTADTKIQRMPSESAAQSLAVALPLQTKADANRTAPSGSEYRHPGASDRPQPTAMNSIVMETGNTKNSALMAKKAPTMPKPQWHPPWKLYRVISGHLGWVRCIAVEP

SEQ ID NO: 98645 - protein, 127 aa, Homo sapiens
  MOD_RES (1)..(1): Any amino acid
XIIVAEFHKKIKEAFEVFDHESNNTVDVREIGTIIRSLGCCPTEGELHDLIAEVEEEEPTGYIRFEKFLPVMTEILLERKYRPIPEDVLLRAFEVLDSAKRGFLTKDELIKYMTEEETGKLRWGAVK

SEQ ID NO: 98646 - protein, 683 aa, Homo sapiens
EHFCDYTEDELNEILNGMDEVLDSPEDLEKKRICRIITRDFPQYFAVVSRIKQDSNLIGPEGGVLSSTVVPQVQAVFPEGALTKRIRVGLQAQPMHSELVKKILGNKATFSPIVTLEPRRRKFHKPITMTIPVPKASSDVMLNGFGGDAPTLRLLCSITGGTTPAQWEDITGTTPLTFVNECVSFTTNVSARFWLIDCRQIQESVTFASQVYREIICVPYMAKFVVFAKSHDPIEARLRCFCMTDDKVDKTLEQQENFAEVARSRDVEVLEGKPIYVDCFGNLVPLTKSGQHHIFSFFAFKENRLPLFVKVRDTTQEPCGRLSFMKEPKSTRGLVHQAICNLNITLPIYTKESESDQEQEEEIDMTSEKNPQDEQERIEERLAYIADHLGFSWTELARELDFTEEQIHQIRIENPNSLQDQSHALLKYWLERDGKHATDTNLVECLTKINRMDIVHLMETNTEPLQERISHSYAEIEQTITLDHSEGFSVLQEELCTAQHKQKEEQAVSKESETCDHPPIVSEEDISVGYSTFQDGVPKTEGDSSATALFPQTHKEQVQQDFSGKMQDLPEESSLEYQQEYFVTTPGTETSETQKAMIVPSSPSKTPEEVSTPAEEEKLYLQTPTSSERGGSPIIQEPEEPSEHREESSPRKTSLVIVESADNQPETCERLDEDAAFEKDNNE

SEQ ID NO: 98647 - protein, 51 aa, Homo sapiens
MLENLALISSLGCWCGSKDEEAPCKQRISVQRESQSRTPRAGVSPKKAHPC

SEQ ID NO: 98648 - protein, 73 aa, Homo sapiens
MEISNLYIYDTVLLLANAFHKKLEDRKWHSMASLSCIRKNSKPWQGGRSMLETIKKGGVSGLTGELEFGENGG

SEQ ID NO: 98649 - protein, 48 aa, Homo sapiens
MGYVRMIRSGGLHCSSNAIRFVPDLEDIVNFEELVKEEGLAEETLKAA

SEQ ID NO: 98650 - protein, 734 aa, Homo sapiens
MEVQLGLGRVYPRPPSKTYRGAFQNLFQSVREVIQNPGPRHPEAASAAPPGASLLLLQQQQQQQQQQQQQQQQQQQQQQQETSPRQQQQQQGEDGSPQAHRRGPTGYLVLDEEQQPSQPQSALECHPERGCVPEPGAAVAASKGLPQQLPAPPDEDDSAAPSTLSLLGPTFPGLSSCSADLKDILSEASTMQLLQQQQQEAVSEGSSSGRAREASGAPTSSKDNYLGGTSTISDNAKELCKAVSVSMGLGVEALEHLSPGEQLRGDCMYAPLLGVPPAVRPTPCAPLAECKGSLLDDSAGKSTEDTAEYSPFKGGYTKGLEGESLGCSGSAAAGSSGTLELPSTLSLYKSGALDEAAAYQSRDYYNFPLALAGPPPPPPPPHPHARIKLENPLDYGSAWAAAAAQCRYGDLASLHGAGAAGPGSGSPSAAASSSWHTLFTAEEGQLYGPCGGGGGGGGGGGGGGGGGGGGGGGEAGAVAPYGYTRPPQGLAGQESDFTAPDVWYPGGMVSRVPYPSPTCVKSEMGPWMDSYSGPYGDMRLETARDHVLPIDYYFPPQKTCLICGDEASGCHYGALTCGSCKVFFKRAAEGKQKYLCASRNDCTIDKFRRKNCPSCRLRKCYEAGMTLGARKLKKLGNLKLQEEGEASSTTSPTEETTQKLTVSHIEGYECQPIFLNVLEAIEPGVVCAGHDNNQPDSFAALLSSLNELGERQLVHVVKWAKALPDCERAASVHF

SEQ ID NO: 98651 - protein, 93 aa, Homo sapiens
MDEDTHYDKVEDVVGSHIEDAVTFWAQSINRNKDIMKIGCSLSEVCPQASSVLGNLDPNKIYGGLFSEDQCWYRCKVLKIISVEKCLVRYIDY

SEQ ID NO: 98652 - protein, 44 aa, Homo sapiens
MVPAAGRRPPRVMRLLGWWQVLLWVLGLPVRGVEGPYGFSEPKR

SEQ ID NO: 98653 - protein, 1032 aa, Homo sapiens
MGGGKSGTVSSQKQPASKTASDKTDSALNTATEIKDGLQCGTVSSQKQQALKATTDEEGSVSNIATEIKDGEKSGTVSSQKKPALKATSDEKDSFSNITREKKDGEISRTVSSQKPPALKATSVKEDSVLNIAREKKDGEKSRTVSFEQPPGLKATRDEKDSLLNIARGKKDGEKTRRVRVDKKFSSLNKSAGGSLKLHILIQHKGGRRKRGMSSHKQPSLKATSDKEDSVPNMATETKDEQISGTVSCQKQPALKATSDKKDSVSNIPTEIKDGQQSGTVSSQKQPAWKATSVKKDSVSNIATEIKDGQIRGTGILEYTFNVMFDQIEEKFTSPNKSAGGVSPQKQSAQKVIFKKKVSLLNIATRITGGGKSGTEYPENLRTLKATIENKDSVLNTATKMKEVQTSTPAEQDLEMASEGEQKRLEEYENNQPQVKNQIHSRDDLDDIIQSSQTVSEDGDSLCCNCKNVILLIDQHEMKCKDCVHLLKIKNTFCLWKRLIKLKDNHCEQLRVKIRKLKNKASVLQKRISEKEEIKSQLKHEILELEKELCSLRFAIQQEKKKRRNVEELHQKVREKLRITEEQYRIEADVTKPIKPALKSAEVELKTGGNNSNQVSETDEKEDLLHENRLMQDEIARLRLEKDTIKNQNLEKKYLKDFEIVKRKHEDLQKALKRNGETLAKTIACYSGQLAALTDENTTLRSKLEKQRESRQRLETEMQSYRCRLNAARCDHDQSHSSKRDQELAFQGTVDKCRHLQENLNSHVLILSLQLSKAESKSRVLKTELHYTGEALKEKALVFEHVQSELKQKQSQMKDIEKMYKSGYNTMEKCIEKQERFCQLKKQNMLLQQQLDDARNKADNQEKAILNIQARCDARVQNLQAECRKHRLLLEEDNKMLVNELNHSKEKECQYEKEKAEREVAVRQLQQKRDDVLNKGSATKALLDASSRHCTYLENGMQDSRKKLDQMRSQFQEIQDQLTATIRCTKEMEGDTQKLEVEHVMMRKIIKKQDDQIERLEKILQHSSLMLQVFES

SEQ ID NO: 98654 - protein, 135 aa, Homo sapiens
MADSEALPSLAGDPVAVEALLRAVFGVVVDEAIQKGTSVSQKCHYSIQKGAAFLGLGTDSVRVVKADERGKMVPEDLERQIGMAEAEGAVPFLVSATSGTTVLGAFDPLEAIADVCQRHGLWLHVDAAWGGSVLL

SEQ ID NO: 98655 - protein, 1465 aa, Homo sapiens
VFAQTFQQTMLPSIRKASLALIRKMIHFCSEALLKEVCDSDVGHNLPTILVEITATVLDQEDDDDGHLLALQIIRDLVDKGGDIFLDQLARLGVISKVSTLAGPSSDDENEEESKPEKEDEPQEDAKELQQGKPYHWRDWSIIRGRDCLYIWSDAAALELSNGSNGWFRFILDGKLATMYSSGSPEGGSDSSESRSEFLEKLQRARGQVKPSTSSQPILSAPGPTKLTVGNWSLTCLKEGEIAIHNSDGQQATILKEDLPGFVFESNRGTKHSFTAETSLGSEFVTGWTGKRGRKLKSKLEKTKQKVRTMARDLYDDHFKAVESMPRGVVVTLRNIATQLESSWELHTNRQCIESENTWRDLMKTALENLIVLLKDENTISPYEMCSSGLVQALLTVLNNSMDLDMKQDCSQLVERINVFKTAFSENEDDESRPAVALIRKLIAVLESIERLPLHLYDTPGSTYNLQILTRRLRFRLERAPGETALIDRTGRMLKMEPLATVESLEQYLLKMVAKQWYDFDRSSFVFVRKLREGQNFIFRHQHDFDENGIIYWIGTNAKTAYEWVNPAAYGLVVVTSSEGRNLPYGRLEDILSRDNSALNCHSNDDKNAWFAIDLGLWVIPSAYTLRHARGYGRSALRNWVFQVSKDGQNWTSLYTHVDDCSLNEPGSTATWPLDPPKDEKQGWRHVRIKQMGKNASGQTHYLSLSGFELYGTVNGVCEDQLGKAAKEAEANLRRQRRLVRSQVLKYMVPGARVIRGLDWKWRDQDGSPQGEGTVTGELHNGTTQSWSSLVKNNCPDKTSAAAGSSSRKGSSSSVCSVASSSDISLGSTKTERRSEIVMEHSIVSGADVHEPIVVLSSAENVPQTEVGSSSSASTSTLTAETGSENAERKLGPDSSVRTPGESSAISMGIVSVSSPDVSSVSELTNKEAASQRPLSSSASNRLSVSSLLAAGAPMSSSASVPNLSSRETSSLESFVRRVANIARTNATNNMNLSRSSSDNNTNTLGRNVMSTATSPLMGAQSFPNLTTPGTTSTVTMSTSSVTSSSNVATATTVLSVGQSLSNTLTTSLTSTSSESDTGQEAEYSLYDFLDSCRASTLLAELDDDEDLPEPDEEDDENEDDNQEDQEYEEVMILRRPSLQRRAGSRSDVTHHAVTSQLPQVPAGAGSRPIGEQEEEEYETKGGRRRTWDDDYVLKRQFSALVPAFDPRPGRTNVQQTTDLEIPPPGTPHSELLEEVECTPSPRLALTLKVTGLGTTREVELPLTNFRSTIFYYVQKLLQLSCNGNVKSDKLRRIWEPTYTIMYREMKDSDKEKENGKMGCWSIEHVEQYLGTDELPKNDLITYLQKNADAAFLRHWKLTGTNKSIRKNRNCSQLIAAYKDFCEHGTKSGLNQGAISTLQSSDILNLTKEQPQAKAGNGQNSCGVEDVLQLLRILYIVASDPYSRISQEDGDEQPQFTFPPDEFTS

SEQ ID NO: 98656 - protein, 548 aa, Homo sapiens
  MOD_RES (1)..(1): Any amino acid
XEARLKYEKEEMERLEIQRIEKEKWHRLEAKDLERRNEELEELYLLERCFPEAEKLKQETKLLSQWKHYIQCDGSPDPSVAQEMNTFISLWKEKTNETFEEVIEKSKVVLNLIEKLKFILLETPPCDLQDKNIIQYQESILQLQELLHLKFGVATEILLKSSAEEESEAIKCEREMKVLSETVSAAQLLLVENSSEKPDFFEDNVVDLCQFTTLGGVYHLDILELPPQCKPVKGWMIVEILKEGLQKYTYPPETTEEFETENAFPPIEVTLEVHENVIFFEDPVVVRWDAEGKHWRTDGISNVSYKPKERLVTFSLDTFGPVTLIQDAHINMPYQSWELRPLDVNKVLLTVTTVFTEIQIQIKENLCMLSSIKLKDKKHISILEGTWMTPIPFIIALKEAGLNIFPTRHSHFYVIINNKVPLVEVKAYRQMALLSSAFAFGWSKWNLLCNSTKVVFKVREHLTEACTENPNWALLMFSGDRAQRLKIKEESEAFSEALKEETEFHSTLYHMVKDFASEEAMEKVRSSNCQFVNSVCHMLLSTRLLSYS

SEQ ID NO: 98657 - protein, 277 aa, Homo sapiens
  MOD_RES (1)..(1): Any amino acid
XRALQYEQTLMYGRYTQDLGAFAKEEAARIRLGGPEPWKGPPSSRAAPELLEYGRSRCARCRVCSVRCHKFLVSRVGEDWIFLVLLGLLMALVSWVMDYAIAACLQAQQWMSRGLNTSILLQYLAWVTYPVVLITFSAGFTQILAPQAVGSGIPEMKTILRGVVLKEYLTLKTFIAKVIGLTCALGSGMPLGKEASSSASRSPPPSLQCGTTGGASSLPPSVPSSSGSWQSGTGMKRLLQPSSKPDSGSTSPLTCRSCQPLLSLVLLVASVEPSLST

SEQ ID NO: 98658 - protein, 45 aa, Homo sapiens
MKRMVSWSFHKLKTMKHLLLLLLCVFLVKSQGVNDNEEMRKLGHR

SEQ ID NO: 98659 - protein, 89 aa, Homo sapiens
MTEDKVTGTLVFTVITAVLGSFQFGYDIGVINAPQQNQSHVSSKHSVISWSSLDGVFKIGTISYTYNCWKKHIRTILWANFRPGSYVYR

SEQ ID NO: 98660 - protein, 81 aa, Homo sapiens
MTGWSCLVTGAGGFLGQRIIRLLVKEKELKEIRVLDKAFGPELREEFSKLQNKTKLTVLEGDILDEPFLKRACQDVSVIIH

SEQ ID NO: 98661 - protein, 325 aa, Homo sapiens
MMFRDQVGILAGWFKGWNECEQTVALLSLLKRVTRTQARFLQLCLEHSLADCNDIHLLESEANSAAIVSQWQQESKEKVVSLLLSHLPLLQPGNTEAKSEYMRLLQKVLAYSIESNAFIEESRQLLSYALIHPATTLEDRNALALWLSHLEERLASGFRSRPEPSYHSRQGSDEWGGPAELGPGEAGPGWQDKPPRENGHVPFHPSSSVPPAINSIGSNANTGLPCQIHPSPLKRSMSLIPTSPQVPGEWPSPEELGARAAFTTPDHAPLSPQSSVASSGSEQTEEQGSSRNTFQEDGSGMKDVPSWLKSLRLHKYAALFSQNQL

SEQ ID NO: 98662 - protein, 600 aa, Homo sapiens
MMRKWEGGDPGVAHQKTPTCLLLTPEGAFHSFGYTARDYYHDLDPEEARDWLYFEKFKMKIHSATDLTLKTQLEAVNGKTMPALEVFAHALRFFREHALQELREQSPSLPEKDTVRWVLTVPAIWKQPAKQFMREAAYLAGLVSRENAEQLLIALEPEAASVYCRKLRLHQLLDLSGRAPGGGRLGERRSIDSSFRQAREQLRRSRHSRTFLVESGVGELWAEMQAGDRYVVADCGGGTVDLTVHQLEQPHGTLKELYKASGGPYGAVGVDLAFEQLLCRIFGEDFIATFKRQRPAAWVDLTIAFEARKRTAGPHRAGALNISLPFSFIDFYRKQRGHNVETALRRSSVNFVKWSSQGMLRMSCEAMNELFQPTVSGIIQHIEALLARPEVQGVKLLFLVGGFAESAVLQHAVQAALGARGLRVVVPHDVGLTILKGAVLFGQAPGVVRVRRSPLTYGVGVLNRFVPGRHPPEKLLVRDGRRWCTDVFERFVAAEQSVALGEEVRRSYCPARPGQRRVLINLYCCAAEDARFITDPGVRKCGALSLELEPADCGQDTAGAPPGRREIRAAMQFGDTEIKVTAVDVSTNRSVRASIDFLSN

SEQ ID NO: 98663 - protein, 25 aa, Homo sapiens
MSNQTDLLALGTAVGSILLYSTVKG

SEQ ID NO: 98664 - protein, 119 aa, Homo sapiens
MAGQPAATGSPSADKDGMEPNVVARISQWADDHLRLVRGHGIPLWPKLECSGTIIAHCCCSTHFGRKDPPTSASRVAGTTEHQHWNGHSWNNVTFEKHSTDIKIYKLFGYSSRIYKKKC

SEQ ID NO: 98665 - protein, 61 aa, Homo sapiens
MPFFGNTFSPKKTPPRKSASLSNLHSLDRSTREVELGLEYGSPTMNLAGQSLKFENGQWIA

SEQ ID NO: 98666 - protein, 140 aa, Homo sapiens
MCGRTSCHLPRDVLTRACAYQDRRGQQRLPEWRDPDKYCPSYNKSPQSNSPVLLSRLHFEKSGSIGAADSPENWEKVWDNWRLLTMAGIFDCWEPPEGGDVLYSYTIITVDSCKGLSDIHHRMPAILDGEEAVSKWLDFG

SEQ ID NO: 98667 - protein, 208 aa, Homo sapiens
MLDFAIFAVTFLLALVGAVLYLYPASRQAAGIPGITPTEEKDGNLPDIVNSGSLHEFLVNLHERYGPVVSFWFGRRLVVSLGTVDVLKQHINPNKTSDPFETMLKSLLRYQSGGGSVSENHMRKKLYENGVTDSLKSNFALLLKLSEELLDKWLSYPETQHVPLSQHMLGFAMKSVTQMVMGSTFEDDQEVIRFQKNHGTPSCNWSLF

SEQ ID NO: 98668 - protein, 111 aa, Homo sapiens
MSSDRQRSDDESPSTSSGSSDADQRDPAAPEPEEQEERKPSATQQKKNTKLSSKTTAKLSTSAKRIQKELAEITLDPPPNCRKISKSCIECKDIQIENEELVLSVSSSLSI

SEQ ID NO: 98669 - protein, 1046 aa, Homo sapiens
MEERKHETMNPAHVLFDRFVQATTCKGTLKAFQELCDHLELKPKDYRSFYHKLKSKLNYWKAKALWAKLDKRGSHKDYKKGKACTNTKCLIIGAGPCGLRTAIDLSLLGAKVVVIEKRDAFSRNNVLHLWPFTIHDLRGLGAKKFYGKFCAGAIDHISIRQLQLILLKVALILGIEIHVNVEFQGLIQPPEDQENERIGWRALVHPKTHPVSEYEFEVIIGGDGRRNTLEGFRRKEFRGKLAIAITANFINRNTTAEAKVEEISGVAFIFNQKFFQELREATGIDLENIVYYKDDTHYFVMTAKKQSLLDKGVILHDYADTELLLSRENVDQEALLSYAREAADFSTQQQLPSLDFAINHYGQPDVAMFDFTCMYASENAALVREQNGHQLLVALVGDSLLEPFWPMGTGIARGFLAAMDSAWMVRSWSLGTSPLEVLAERESIYRLLPQTTPENVSKNFSQYSIDPVTRYPNINVNFLRPSQVRHLYDTGETKDIHLEMESLVNSRTTPKLTRNESVARSSKLLGWCQRQTDGYAGVNVTDLTMSWKSGLALCAIIHRYRPDLIDFDSLDEQNVEKNNQLAFDIAEKELGISPIMTGKEMASVGEPDKLSMVMYLTQFYEMFKDSLPSSDTLDLNAEEKAVLIASTRSPISFLSKLGQTISRKRSPKDKKEKDLDGAGKRRKTSQSEEEEAPRGHRGERPTLVSTLTDRRMDVAVGNQNKVKYMATQLLAKFEENAPAQSIGIRRQGSMKKEFPQNLGGSDTCYFCQKRVYVMERLSAEGKFFHRSCFKCEYCATTLRLSAYAYDIEDGKFYCKPHYCYRLSGYAQRKRPAVAPLSGKEAKGPLQDGATTDANGRANAVASSTERTPGSGVNGLEEPSIAKRLRGTPERIELENYRLSLRQAEALQEVPEETQAEHNLSSVLDTGAEEDVASSSSESEMEEEGEEEEEEPRLPPSDLGGVPWKEAVRIHALLKGKSEEELEASKSFGPGNEEEEEEEEEYEEEEEEDYDEEEEESSEEGEYCPWDTELQGQWRQVPPTGRRFEDI

SEQ ID NO: 98670 - protein, 195 aa, Homo sapiens
MESDLHQIIHSSQPLTLEHVRYFLYQLLRGLKYMHSAQVIHRDLKPSNLLVNENCELKIGDFGMARGLCTSPAEHQYFMTEYVATRWYRAPELMLSLHEYTQAIDLWSVGCIFGEMLARRQLFPGKNYVHQLQLIMMVLGTPSPAVIQAVGAERVRAYIQSLPPRQPVPWETVYPGADRQALSLLGRMLRFEPSA

SEQ ID NO: 98671 - protein, 55 aa, Homo sapiens
MSVLTSPRGKVEVVHCRRTESQDVYCIKSLIRKFTCKLFGKLNIIYLLFSRSCLH

SEQ ID NO: 98672 - protein, 591 aa, Homo sapiens
MCGAILGDILHLADHQGTHHKQKLHRCEAWGNKLYDSSNRPHQNQYLGEKPYRSSVEEALFVKRCKFHVSEESSIFIQSGKDFLPSSGLLLQEATHTGEKSNSKPECESPFQWGDTHYSCGECMKHSSTKHVFVQQQRLPSREECYCWECGKSFSKYDSVSNHQRVHTGKRPYECGECGKSFSHKGSLVQHQRVHTGKRPYECGECGKSFSHKGSLVQHQRVHTGERPYECGECGKSFSQNGTLIKHQRVHTGERPYECEECGKCFTQKGNLIQHQRGHTSERPYECEECGKCFSQKGTLTEHHRVHTRERPYECGECGKSFSRKGHLRNHQRGHTGERPYECGECGKSFSRKGNLIQHQRSHTGERPYECRECRKLFRGKSHLIEHQRVHTGERPYECNECGKSFQDSSGFRVHQRVHTGEKPFECSECGKSFPQSCSLLRHRRVHTGERPYECGECGKSFHQSSSLLRHQKTHTAERPYECRECGKFFSSLLEHRRVHTGERPYECRECGKTFTRRSAHFKHQRLHTRGKPYECSECGKSFAETFSLTEHRRVHTGERPYECSECGKSFHRSSSLLRHQRVHTERSPYK

SEQ ID NO: 98673 - protein, 103 aa, Homo sapiens
  MOD_RES (1)..(1): Any amino acid
XLSVTSRGKLEQKLKWAFSMYDLDGNGYISRSEMLEIVQAIYKMVSSVMKMPEDESTPEKRTDKIFRQMDTNNDVSLGKPPMVTRCPNLPPGLALPTSSEGIF

SEQ ID NO: 98674 - protein, 111 aa, Homo sapiens
MNKSQEQVSFKDVCVDFTQEEWYLLDPAQKILYRDVILENYSNLVSVGYCITKPEVIFKIEQGEEPWILEKGFPSQCHPERKWKVDDVLESSQENEDDHFWELLFHNNKTH

SEQ ID NO: 98675 - protein, 310 aa, Homo sapiens
MDFITSTAILPLLFGCLGVFGLFRLLQWVRGKAYLRNAVVVITGATSGLGKECAKVFYAAGAKLVLCGRNGGALEELIRELTASHATKVQTHKPYLVTFDLTDSGAIVAAAAEILQCFGYVDILVNNAGISYRGTIMDTTVDVDKRVMETNYFGPVALTKALLPSMIKRRQGHIVAISSIQGKMSIPFRSAYAASKHATQAFFDCLRAEMEQYEIEVTVISPGYIHTNLSVNAITADGSRYGVMDTTTAQGRSPVEVAQDVLAAVGKKKKDVILADLLPSLAVYLRTLAPGLFFSLMASRARKERKSKNS

SEQ ID NO: 98676 - protein, 70 aa, Homo sapiens
MQEKKRRHLLYVGGSLCLTAVIVCCIDAFVVTTKMRTNLKRFLGVEVERKLSPAKDAYPETGPDAPQRPA

SEQ ID NO: 98677 - protein, 130 aa, Homo sapiens
  MOD_RES (1)..(1): Any amino acid
XPLDHTNVTAPQASMMFQYFVKVVPTVYMKVDGEAPLPPQVLRTNQFSVTRHEKVANGLLGDQGLPGVFVLYELSPMMVKLTEKHRSFTHFLTGVCAIIGGMFTVAGLIDSLIYHSARAIQKKIDLGKTT

SEQ ID NO: 98678 - protein, 685 aa, Homo sapiens [sequence omitted]

SEQ ID NO: 98679 - protein, 125 aa, Homo sapiens
MHEQIENEYIIGLLQQRSQTIYNVHSDNKLSEMLSLFEKGLKNVKNEYEQLNYAKQLKERLEAFTRDFLPHMKEEEEVFQPMLMEYFTYEELKDIKKKVIAQHCSQKDTAELLRGLSLWNHAEER

SEQ ID NO: 98680 - protein, 196 aa, Homo sapiens
  MOD_RES (1)..(1): Any amino acid
XSSPIHSGFLVSFMVDARGGSMRGSRHHGMRIIIPPRKCTAPTRITCRLVKRHKLANPPPMVEGEGLASRLVEMGPAGAQFLGKLHLPTNPPPVNEGESLVSRILQLGPQGTKFIGPVIVEIPHFGSMRGKERELIVLRSENGETWKEHQFDSKNEDLTELLNGMDEELDSPEELGKKRICRIITKDFPQYFAVVS

SEQ ID NO: 98681 - protein, 39 aa, Homo sapiens
  MOD_RES (1)..(1): Any amino acid
XCAVEVFGLLEDEENSRIVRVRVIAGIGLAKKDILGARV

SEQ ID NO: 98682 - protein, 505 aa, Homo sapiens
MAPWLQLLSLLGLLPGAVAAPAQPRAASFQAWGPPSPELLAPTRFALEMFNRGRAAGTRAVLGLVRGRVRRAGQGSLYSLEATLEEPPCNDPMVCRLPVSKKTLLCSFQVLDELGRHVLLRKDCGPVDTKVPGAGEPKSAFTQGSAMISSLSQNHPDNRNETFSSVISLLNEDPLSQDLPVKMASIFKNFVITYNRTYESKEEARWRLSVFVNNMVRAQKIQALDRGTAQYGVTKFSDLTEEEFRTIYLNTLLRKEPGNKMKQAKSVGDLAPPEWDWRSKGAVTKVKDQGMCGSCWAFSVTGNVEGQWFLNQGTLLSLSEQELLDCDKMDKACMGGLPSNAYSAIKNLGGLETEDDYSYQGHMQSCNFSAEKAKVYINDSVELSQNEQKLAAWLAKRGPISVAINAFGMQFYRHGISRPLRPLCSPWLIDHAVLLVGYGNLGPVQVFEGCKVIKALPGELRTLILALCTAPQALTFPFGPSRTAGALTGVRRVTTTCIVGPGPVA

SEQ ID NO: 98683 - protein, 404 aa, Homo sapiens
MSGAEEAGGGGPAAGPAGSVPAGVGVGVGAGPGAAAGQAAAAALGEAAGPGLPDEAGLAGARQLQLQEAAGDPDAPPKKRLRAAEAAEAAAAAAAAGSGKLEERLYSVLCCTVCLDLPKASVYQCTNGHLMCAGCFIHLLADARLKEEQATCPNCRCEISKSLCCRNLAVEKAVSELPSECGFCLRQFPRSLLERHQKEECQDRVTQCKYKRIGCPWHGPFHELTVHEAACAHPTKTGSELMEILDGMDQSHRKEMQLYNSIFSLLSFEKIGYTEVQFRPYRTDDFITRLYYETPRFTVLNQTWVLKARVNDSERNPNLSCKRTLSFQLLLKSKVTAPLECSFLLLKGPYDDVRISPVIYHFVFTNESNETDYVPLPIIDSVECNKLLAAKNINLRLFLFQIQK

SEQ ID NO: 98684 - protein, 201 aa, Homo sapiens
  MOD_RES (1)..(1): Any amino acid
XHGNGLLYAGFNQDHGCFACGMENGFRVYNTDPLKEKEKQEFLEGGVGHVEMLFRCNYLALVGGGKKPKYPPNKVMIWDDLKKKTVIEIEFSTEVKAVKLRRDRIVVVLDSMIKVFTFTHNPHQLHVFETCYNPKGLCVLCPNSNNSLLAFPGTHTGHVQLVDLASTEKPPVDIPAHEGVLSCIALNLQGTRIATASEKGI

SEQ ID NO: 98685 - protein, 141 aa, Homo sapiens
MWVTKLLPALLLQHVLLHLLLLPIAIPYAEGQRKRRNTIHEFKKSAKTTLIKIDPALKIKTKKVNTADQCANRCTRNKGLPFTCKAFVFDKARKQCLWFPFNSMSSGVKKEFGHEFDLYENKDYIRNCIIGKGRSYKGTVS

SEQ ID NO: 98686 - protein, 122 aa, Homo sapiens
MIETLARKLNEKSKEQMELHHQNLNLQETLKRVANCSAPCPQDWIWHGENCYLFSSGSFNWEKSQEKCLSLDAKLLKINSTADLDFIQQAISYSSFPFWMGLSRRNPSYPWLWEDGSPLMPH

SEQ ID NO: 98687 - protein, 193 aa, Homo sapiens
MSGKHYKGPEVSCCIKYFIFGFNVIFWFLGITFLGIGLWAWNEKGVLSNISSITDLGGFDPVWLFLVVGGVMFILGFAGCIGALRENTFLLKFFSVFLGIIFFLELTAGVLAFVFKDWIKDQLYFFINNNIRAYRDDIDLQNLIDFTQEYIPMQVESDVAFHSPAALKIPQKMSSTLSVAMMPGKNQKLTSRL

SEQ ID NO: 98688 - protein, 42 aa, Homo sapiens
MPNVPNTQPAIMKPTEEHPAYTQIAKEHALAQAELLKRQEEL

SEQ ID NO: 98689 - protein, 94 aa, Homo sapiens
MTGSRNWRATRDMCRYRHNYPDLVERDCNGDTPNLSFYRNEIRFLPNGCFIEDILQNWTDNYDLLEDNHSYIQWLFPLREPGVNWHAKPLTLRE

SEQ ID NO: 98690 - protein, 66 aa, Homo sapiens
MASNVTNKTDPRSMNSRVFIGNLNTLVVKKSDVEAIFSKYGKIVGCSVHKGFAFVQYVNERNARAA

SEQ ID NO: 98691 - protein, 118 aa, Homo sapiens
MLIFWTITLFLLGAAKGKEVCYEDLGCFSDTEPWGGTAIRPLKILPWSPEKIGTRFLLYTNENPNNFQILLLSDPSTIEASNFQMDRKTRFIIHGFIDKGDESWVTDMCKQPGASPRA

SEQ ID NO: 98692 - protein, 197 aa, Homo sapiens
METEVIESLGIIIYKALDYGLKENEERELSPPLEQLIDHMANTVEADGSNDEGYEAAEEGLGDEDEKRKISAIRSYRDVMKLCAAHLPTESDAPNHYQAVCRALFAETMELHTFLTKIKSAKENLKKIQEMEKSDESSTDLEELKNADWARFWVQVMRDLRNGVKLKKVQERQYNPLPIEYQLTPYEMLMDDIRCKR

SEQ ID NO: 98693 - protein, 376 aa, Homo sapiens
MLPAVGSADEEEDPAEEDCPELVPMETTQSEEEEKSGLGAKIPVTIITGYLGAGKTTLLNYILTEQHSKRVAVILNEFGEGSALEKSLAVSQGGELYEEWLELRNGCLCCSVKDNGLRAIENLMQKKGKFDYILLETTGLADPGAVASMFWVDAELGSDIYLDGIITIVDSKYGLKHLAEEKPDGLINEATRQVALADAILINKTDLVPEEDVKKLRATIRSINGLGQILETQRSSLQKKLQHVPGTQPHLDQSIVTITFEVPGNAKEEHLNMFIQNLLWEKNVRNKDNHCMEVIRLKGLVSIKDKSQQVIVQGVHELYDLEETPVSWKDDTERTNRLVLLGRNLDKDILKQLFIATVTETEKQWTTHFKEDQVCT

SEQ ID NO: 98694 - protein, 69 aa, Homo sapiens
MTEAGKLPLPLPPRLDWFVHTQMGQLAQDGVPEWFHGAISRDSLGSGVYSPLEEAEGQKGRDDCLRSHS

SEQ ID NO: 98695 - protein, 1081 aa, Homo sapiens
MDDLDALLADLESTTSHISKRPVFLSEETPYSYPTGNHTYQEIAVPPPVPPPPSSEALNGTILDPLDQWQPSSSRFIHQQPQSSSPVYGSSAKTSSVSNPQDSVGSPCSRVGEEEHVYSFPNKQKSAEPSPTVMSTSLGSNLSELDRLLLELNAVQHNPPGFPADEANSSPPLPGALSPLYGVPETNSPLGGKAGPLTKEKPKRNGGRGLEDVRPSVESLLDELESSVPSPVPAITVNQGEMSSPQRVTSTQQQTRISASSATRELDELMASLSDFKTSSSTVALSAPGLSSSAPSSYCSLPPSPPPMPSVFLPPTTIPSPRGQGHTPEFPCTEQSGRGLLPPVAPSWLDLAGLGVMPDTFNSRSPSVEGSLWAVGTESQGRDWRHLPTITSELSGAPRCHTVPCAGSTALQEPGEPQGPPASPSCPEEALAATWEQPWASEVFGPERMPPSGAARSFQEVTEPAVVAVDRQAIFPDTWTLTEEHGLQQERPRPEPGRLGSSSPASVTTEQLGAKMTERGSVARPTQGPETPRSPEGTTEAATQDGKEQPELPCAMAMGTPSTTERISTSGQIRSVIRRSWESGHAHPMSREPSPRRRLDPATLSRTPSQEQLIAELQGRLGIQPEAEEPAEAAGPSAQDWLTEGVIITVQPRGKRAGGQLVEKVVFPPGSPIPLRRTISVLASPSVPLLQHRTDAAASSSSPLPSLLASSPLGPSAYTCGSSGVQSAGEEPHDEGVQGPALPIPAPHTMRSVGCQTDEDPLFPPMQIQGLEQRADGERCWAAGWPRDGGRSSPGGQDEGGFMAQGKTGSSSPPGGPPKPGSQLDSMLGSLQSDLNKLGVATVAKGVCGACKKPIAGQVVTAMGKTWHPEHFVCTHCQEEIGSRNFFERDGQPYCEKDYHNLFSPRCYYCNGPILDKVVTALDRTWHPEHFFCAQCGAFFGPEGFHEKDGKAYCRKDYFDMFAPKCGGCARAILENYISALNTLWHPECFVCRECFTPFVNGSFFEHDGQPYCEVHYHERRGSLCSGCQKPITGRCITAMAKKFHPEHFVCAFCLKQLNKGTFKEQNDKPYCQNCFLKLFC

SEQ ID NO: 98696 - protein, 133 aa, Homo sapiens
MARRSVLYFILLNALINKGQACFCDHYAWTQWTSCSKTCNSGTQSRHRQIVVDKYYQENFCEQICSKQETRECNWQRCPINCLLGDFGPWSDCDPCIEKQSKVRSVLRPSQFGGQPCTAPLVAFQPCIPSKLC

SEQ ID NO: 98697 - protein, 108 aa, Homo sapiens
MAEAATPGTTATTSGAGAAAATAAAASPTPIPTVTAPSLGAGGGGGGSDGSGGGWTKQVTCRWSLCRPSWSAVARSRLTTTSASWVQGILVPQPSEKLGLQVFYAWGL

SEQ ID NO: 98698 - protein, 19 aa, Homo sapiens
MKGLYFQQSSTDEEITFVF

SEQ ID NO: 98699 - protein, 568 aa, Homo sapiens
  MOD_RES (1)..(1): Any amino acid
XLSYAKQLRNLSKKYQPKKNSKEEEEYKYTSCKAFISNLNEMNDYAGQHEVISENMASQIIVDLARYVQELKQERKSNFHDGRKAQQHIETCWKQLESSKRRFERDCKEADRAQQYFEKMDADINVTKADVEKARQQAQIRHQMAEDSKADYSSILQKFNHEQHEYYHTHIPNIFQKIQEMEERRIVRMGESMKTYAEVDRQVIPIIGKCLDGIVKAAESIDQKNDSQLVIEAYKSGFEPPGDIEFEDYTQPMKRTVSDNSLSNSRGEGKPDLKFGGKSKGKLWPFIKKNKPPPPPPASASPSAVPNGPQSPKQQKEPLSHRFNEFMTSKPKIHCFRSLKRGGATPEDFSNLPPEQRRKKLQQKVDELNKEIQKEMDQRDAITKMKDVYLKNPQMGDPASLDHKLAEVSQNIEKLRVETQKFEAWLAEVEGRLPARSEQARRQSGLYDSQNPPTVNNCAQDRESPDGSYTEEQSQESEMKVLATDFDDEFDDEEPLPAIGTCKALYTFEGQNEGTISVVEGETLYVIEEDKGDGWTRIRRNEDEEGYVPTSYVEVCLDKNAKGAKTYI

SEQ ID NO: 98700 - protein, 183 aa, Homo sapiens
MATASPSVFLLMVNGQVESAQFPEYDDLYCKYCFVYGQDWAPTAGLEEGISQITSKSQDVRQALVWNFPIDVTFKSTNPYGWPQIVLSVYGPDVFGNDVVRGYGAVHVPFSPGRHKRTIPMFVPESTSKLQKFTSWFMGRRPEYTDPKVVAQGEGREGKAPSPLLPPSPIQVTAWEWVGPGLG

SEQ ID NO: 98701 - protein, 87 aa, Homo sapiens
MREYKLVVLGSGGVGKSALTVQFVQGIFVEKYDPTIEDSYRKQVEVDAQQCMLEILDTAGTEQFTAMRDLYMKNGQGFALVYSITAQ

SEQ ID NO: 98702 - protein, 322 aa, Homo sapiens
MPAKAPPGDEEGFDYNEEERYDCKGGELFANQRRFPGHLFWDFQINILGEKDDTPVHFCDKCGLPIKIYGRMIPCKHVFCYDCAILHEKKGDKMCPGCSDPVQRIEQCTRGSLFMCSIVQGCKRTYLSQRDLQAHINHRHMRAGKPVTRASLENVHPPIAPPPTEIPERFIMPPDKHHMSHIPPKQHIMMPPPPLQHVPHEHYNQPHEDIRAPPAELSMAPPPPRSVSQETFRISTRKHSNLITVPIQDDSNSGAREPPPPAPAPAHHHPEYQGQPVVSHPHHIMPPQQHYAPPPPPPPPISHPMPHPPQAAGTPHLVYSQA

SEQ ID NO: 98703 - protein, 260 aa, Homo sapiens
MLESSGCKALKEGVLEKRSDGLLQLWKKKCCILTEEGLLLIPPKQLQHQQQQQQQQQQQQQQQPGQGPAEPSQPSGPAVASLEPPVKLKELHFSNMKTVDCVERKGKYMYFTVVMAEGKEIDFRCPQDQGWNAEITLQMVQYKNRQAILAVKSTRQKQQHLVQQQPPSQPQPQPQLQPQPQPQPQPQPQPQSQPQPQPQPKPQPQQLHPYPHPHPHPHSHPHSHPHPHPHPHPHQIPHPHPQPHSQPHGHRLLRSTSNSA

SEQ ID NO: 98704 - protein, 164 aa, Homo sapiens
  MOD_RES (1)..(1): Any amino acid
XQIPAPSWPIHGPVIHSAPGSAPSNIGLNDPSIIFAQPAARPVAIPNTSHDGHWPRTVAPNSLVNSGAVGNSEPGFRGLTPPIPWEHAPRPHFPLVPASWPYGLHQNFMHQGNARFQPNKPFYTQGKKAAIVEVECSRRKTAKIWRPEFKFPCYHLWLWEHHTY

SEQ ID NO: 98705 - protein, 730 aa, Homo sapiens
MAGSSTGGGGVGETKVIYHLDEEETPYLVKIPVPAERITLGDFKSVLQRPAGAKYFFKSMDQDFGVVKEEISDDNARLPCFNGRVVSWLVSSDNPQPEMAPPVHEPRAELAPPAPPLPPLPPERTSGIGDSRPPSFHHENLEPETETESVVSLRRERPRRRDSSEHGAGGHRTGGPSRLERHLAGYESSSTLMTSELESTSLGDSDEEDTMSRFSSSTEQSSASRLLKRHRRRRKQRPPRLERTSSFSSVTDSTMSLNIITVTLNMEKYNFLGISIVGQSNERGDGGIYIGSIMKGGAVAADGRIEPGDMLLQVNDMNFENMSNDDAVRVLRDIVHKPGPIVLTVAKCWDPSPQAYFTLPRNEPIQPIDPAAWVSHSAALTGTFPAYPGSSSMSTITSGSSLPDGCEGRGLSVHTDMASVTKAMAAPESGLEVRDRMWLKITIPNAFLGSDVVDWLYHHVEGFPERREARKYASGLLKAGLIRHTVNKITFSEQCYYVFGDLSGGCESYLVNLSLNDNDGSSGASDQDTLAPLPGATPWPLLPTFSYQYPAPHPYSPQPPPYHELSSYTYGGGSASSQHSEGSRSSGSTRSDGGAGRTGRPEERAPESKSGSGSESEPSSRGGSLRRGGEASGTSDGGPPPSRGSTGGAPNLRAHPGLHPYGPPPGMALPYNPMMVVMMPPPPPPVPPAVQPPGAPPVRDLGSVPPELTASRQSFHMAMGNPSEFFVDVM

SEQ ID NO: 98706 - protein, 108 aa, Homo sapiens
LAPERGAERRDTAPSGVSRFCPPRKSCHDWIGPPDKYSNLRPVHFYIPENESPLEQKLRKLRQETQEWNQQFWANQNLTFSKEKEEFIHSRLKTKGLGLRTESGGYDG

SEQ ID NO: 98707 - protein, 116 aa, Homo sapiens
MTEETHPDDDSYIVRVKAVVMTRDDSSGGWFPQEGGGISRVGVCKVMHPEGNGRSGFLIHGERQKDKLVVLECYVRKDLVYTKANPTFHHWKVDNRKFGLTFQSPADARAFDRGVR

SEQ ID NO: 98708 - protein, 174 aa, Homo sapiens
MASLQRSRVLRCCSCRLFQAHQVKKSVKWTCKACGEKQSFLQEKSQPSESRWLKYLEKDSQELELEGTGVCFSKQPSSKMEEPGPRFSQDLPRKRKWSRSTVQPPCSRGVQDSGGSEVAWGPQKGQAGLTWKVKQGSSPCLQENSADCSAGELRGPGKELWSPIQQDGYKEILF

SEQ ID NO: 98709 - protein, 308 aa, Homo sapiens
MLELSAPELEPPKAALSPSQVEVPEDEEDYTGVCHPECGDKGCDGPNADQCLNCVHFSLGSVKTSRKCVSVCPLGYFGDTAARRCRRCHKGCETCSSRAATQCLSCRRGFYHHQEMNTCVTLCPAGFYADESQKNCLKCHPSCKKCVDEPEKCTVCKEGFSLARGSCIPDCEPGTYFDSELIRCGECHHTCGTCVGPGREECIHCAKNFHFHDWKCVPACGEGFYPEEMPGLPHKVCRRCDENCLSCAGSSRNCSRCKTGFTQLGTSCITNHTCSNADETFCEMVKSNRLCERKLFIQFCCRTCLLAG

SEQ ID NO: 98710 - protein, 406 aa, Homo sapiens
MQRLMMLLATSGACLGLLAVAAVAAAGANPAQRDTHSLLPTHRRQKRDWIWNQMHIDEEKNTSLPHHVGKIKSSVSRKNAKYLLKGEYVGKVFRVDAETGDVFAIERLDRENISEYHLTAVIVDKDTGENLETPSSFTIKVHDVNDNWPVFTHRLFNASVPESSAVGTSVISVTAVDADDPTVGDHASVMYQILKGKEYFAIDNSGRIITITKSLDREKQARYEIVVEARDAQGLRGDSGTATVLVTLQDINDNFPFFTQTKYTFVVPEDTRVGTSVGSLFVEDPDEPQNRMTKYSILRGDYQDAFTIETNPAHNEGIIKPMKPLDYEYIQQYSFIVEATDPTIDLRYMSPPAGNRAQVIINITDVDEPPIFQQPFYHFQLKENQKKPLIGTVLAMDPDAARHSIG

SEQ ID NO: 98711 - protein, 1997 aa, Homo sapiens
MEQTVLVPPGPDSFNFFTRESLAAIERRIAEEKAKNPKPDKKDDDENGPKPNSDLEAGKNLPFIYGDIPPEMVSEPLEDLDPYYINKKTFIVLNKGKAIFRFSATSALYILTPFNPLRKIAIKILVHSLFSMLIMCTILTNCVFMTMSNPPDWTKNVEYTFTGIYTFESLIKIIARGFCLEDFTFLRDPWNWLDFTVITFAYVTEFVDLGNVSALRTFRVLRALKTISVIPGLKTIVGALIQSVKKLSDVMILTVFCLSVFALIGLQLFMGNLRNKCIQWPPTNASLEEHSIEKNITVNYNGTLINETVFEFDWKSYIQDSRYHYFLEGFLDALLCGNSSDAGQCPEGYMCVKAGRNPNYGYTSFDTFSWAFLSLFRLMTQDFWENLYQLTLRAAGKTYMIFFVLVIFLGSFYLINLILAVVAMAYEEQNQATLEEAEQKEAEFQQMIEQLKKQQEAAQAATATASEHSREPSAAGRLSDSSSEASKLSSKSAKERRNRRKKRKQKEQSGGEEKDEDEFQKSESEDSIRRKGFRFSIEGNRLTYEKRYSSPHQSLLSIRGSLFSPRRNSRTSLFSFRGRAKDVGSENDFADDEHSTFEDNESRRDSLFVPRRHGERRNSNLSQTSRSSRMLAVFPANGKMHSTVDCNGVVSLVGGPSVPTSPVGQLLPEGTTTETEMRKRRSSSFHVSMDFLEDPSQRQRAMSIASILTNTVEELEESRQKCPPCWYKFSNIFLIWDCSPYWLKVKHVVNLVVMDPFVDLAITICIVLNTLFMAMEHYPMTDHFNNVLTVGNLVFTGIFTAEMFLKIIAMDPYYYFQEGWNIFDGFIVTLSLVELGLANVEGLSVLRSFRLLRVFKLAKSWPTLNMLIKIIGNSVGALGNLTLVLAIIVFIFAVVGMQLFGKSYKDCVCKIASDCQLPRWHMNDFFHSFLIVFRVLCGEWIETMWDCMEVAGQAMCLTVFMMVMVIGNLVVLNLFLALLLSSFSADNLAATDDDNEMNNLQIAVDRMHKGVAYVKRKIYEFIQQSFIRKQKILDEIKPLDDLNNKKDSCMSNHTAEIGKDLDYLKDVNGTTSGIGTGSSVEKYIIDESDYMSFINNPSLTVTVPIAVGESDFENLNTEDFSSESDLEESKEKLNESSSSSEGSTVDIGAPVEEQPVVEPEETLEPEACFTEGCVQRFKCCQINVEEGRGKQWWNLRRTCFRIVEHNWFETFIVFMILLSSGALAFEDIYIDQRKTIKTMLEYADKVFTYIFILEMLLKWVAYGYQTYFTNAWCWLDFLIVDVSLVSLTANALGYSELGAIKSLRTLRALRPLRALSRFEGMRVVVNALLGAIPSIMNVLLVCLIFWLIFSIMGVNLFAGKFYHCINTTTGDRFDIEDVNNHTDCLKLIERNETARWKNVKVNFDNVGFGYLSLLQVATFKGWMDIMYAAVDSRNVELQPKYEESLYMYLYFVIFIIFGSFFTLNLFIGVIIDNFNQQKKKFGGQDIFMTEEQKKYYNAMKKLGSKKPQKPIPRPGNKFQGMVFDFVTRQVFDISIMILICLNMVTMMVETDDQSEYVTTILSRINLVFIVLFTGECVLKLISLRHYYFTIGWNIFDFVVVILSIVGMFLAELIEKYFVSPTLFRVIRLARIGRILRLIKGAKGIRTLLFALMMSLPALFNIGLLLFLVMFIYAIFGMSNFAYVKREVGIDDMFNFETFGNSMICLFQITTSAGWDGLLAPILNSKPPDCDPNKVNPGSSVKGDCGNPSVGIFFFVSYIIISFLVVVNMYIAVILENFSVATEESAEPLSEDDFEMFYEVWEKFDPDATQFMEFEKLSQFAAALEPPLNLPQPNKLQLIAMDLPMVSGDRIHCLDILFAFTKRVLGESGEMDALRIQMEERFMASNPSKVSYQPITTTLKRKQEEVSAVIIQRAYRRHLLKRTVKQASFTYNKNKIKGGANLLIKEDMIIDRINENSITEKTDLTMSTAACPPSYDRVTKPIVEKHEQEGKDEKAKGK

SEQ ID NO: 98712 - protein, 722 aa, Homo sapiens
MGRGPWDAGPSRRLLPLLLLLGLARGAAGAPGPDGLDVCATCHEHATCQQREGKKICICNYGFVGNGRTQCVDKNECQFGATLVCGNHTSCHNTPGGFYCICLEGYRATNNNKTFIPNDGTFCTDIDECEVSGLCRHGGRCVNTHGSFECYCMDGYLPRNGPEPFHPTTDATSCTEIDCGTPPEVPDGYIIGNYTSSLGSQVRYACREGFFSVPEDTVSSCTGLGTWESPKLHCQEINCGNPPEMRHAILVGNHSSRLGGVARYVCQEGFESPGGKITSVCTEKGTWRESTLTCTEILTKINDVSLFNDTCVRWQINSRRINPKISYVISIKGQRLDPMESVREETVNLTTDSRTPEVCLALYPGTNYTVNISTAPPRRSMPAVIGFQTAEVDLLEDDGSFNISIFNETCLKLNRRSRKVGSEHMYQFTVLGQRWYLANFSHATSFNFTTREQVPVVCLDLYPTTDYTVNVTLLRSPKRHSVQITIATPPAVKQTISNISGFNETCLRWRSIKTADMEEMYLFHIWGQRWYQKEFAQEMTFNISSSSRDPEVCLDLRPGTNYNVSLRALSSELPVVISLTTQITEPPLPEVEFFTVHRGPLPRLRLRKAKEKNGPISSYQVLVLPLALQSTFSCDSEGASSFFSNASDADGYVAAELLAKDVPDDAMEIPIGDRLYYGEYYNAPLKRGSDYCIILRITSEWNKIRHSCCCRWRVLDWVPWLL

SEQ ID NO: 98713 - protein, 62 aa, Homo sapiens
MAAKQPPPLMKKHSQTDLVSRLKTRKILGVGGEDDDGEVHRSKISQVLGNEIKFTIREPLGL

SEQ ID NO: 98714 - protein, 131 aa, Homo sapiens
  MOD_RES (1)..(1): Any amino acid
XAQTIIYPMEVLKTRLTLRRTGQYKGLLDCARRILEREGPRAFYRGYLPNVLGIIPYAGIDLAVYETLKNWWLQQYSHDSADPGILVLLACGTISSTCGQIASYPLALVRTRMQAQAGGHAMSSLMERTMW

SEQ ID NO: 98715 - protein, 289 aa, Homo sapiens
MATSALPGMVMEASGSQEAATVTSPCPRGTLGMCTYPRPHEYLSPADLPKSWDWRNVDGVNYASITRNQHIPQYCGSCWAHASTSAMADRINIKRKGAWPSTLLSVQNVIDCGNAGSCEGGNDLSVWDYAHQHGIPDETCNNYQAKDQECDKFNQCGTCNEFKECHAIRNYTLWRVGDYGSLSGREKMMAEIYANGPISCGIMATERLANYTGGIYAEYQDTTYINHVVSVAGWGISDGTEYWIVRNSWGEPWGERGWLRIVTSTYKDGKGARYNLAIEEHCTFGDPIV

SEQ ID NO: 98716 - protein, 68 aa, Homo sapiens
MMVALRGASALLVLFLAAFLPPPQCTQDPAMVHYIYQRFRVLEGWKNVPKQRGHTFKNSKSSQKIYLS

SEQ ID NO: 98717 - protein, 213 aa, Homo sapiens
MPSRKFADGEVVRGRWPGSSLYYEVEILSHDSTSQLYTVKYKDGTELELKENDIKPLTSFRQRKGGSTSSSPSRRRGSRSRSRSRSPGRPPKSARRSASASHQADIKEARREVEVKLTPLILKPFGNSISRYNGEPEHIERNDAPHKNTQEKFSLSQESSYIATQYSLRPRREEVKLKEIDSKEEKYVAKELAVRTFEVTPIRAKDLEFGGVP

SEQ ID NO: 98718 - protein, 51 aa, Homo sapiens
MLATLARVAALRRTCLFSGRGGGRGLWTGRPQSARQCTSIEECALTDGTMI

SEQ ID NO: 98719 - protein, 207 aa, Homo sapiens
  MOD_RES (1)..(1): Any amino acid
XNPCIIATKTPSSDVLVFDYTKHPSKPGHTAVVEDVSWHLLHESLFGSVADDQKLMIWDTRSNNTSKPSHSVDAHTAEVNCLSFNPYSEFILATGSADKTVALWDLRNLKLKLHSFESHKDEIFQVQWSPHNETILASSGTDRRLNVWDLSKIGEEQSPEDAEDGPPELLFIHGGHTAKISDFSWNPNEPWVICSVSEDNIMQVWQM

SEQ ID NO: 98720 - protein, 47 aa, Homo sapiens
MQRASRLKRELHMLATEPPPGITCWQDKDQMDDLRARRNIRWSQHTL

SEQ ID NO: 98721 - protein, 80 aa, Homo sapiens
  MOD_RES (1)..(1): Any amino acid
XYELFAFISHMGTSTMSGHYICHIKKEGRGSWRYQAAITVDHQWWHIVTSVEEGGFGAGRSLLPWTLSAGCHVTDLSLVP

SEQ ID NO: 98722 - protein, 170 aa, Homo sapiens
MSRRVVRQSKFRHVFGQAAKADQAYEDIRVSKVTWDSSFCAVNPKFLAIIVEAGGGGAFIVLPLAKVWQIPDYTPMRNITEPIITLEGHSKRVGILSWHPTARNVLLSAGGDNVIIIWNVGTGEVLLSLDDMHPDVIHSVCWNSNGSLLATTCKDKTLRIIDPRKGQVVA

SEQ ID NO: 98723 - protein, 791 aa, Homo sapiens
MSQWYELQQLDSKFLEQVHQLYDDSFPMEIRQYLAQWLEKQDWEHAANDVSFATIRFHDLLSQLDDQYSRFSLENNFLLQHNIRKSKRNLQDNFQEDPIQMSMIIYSCLKEERKILENAQRFNQAQSGNIQSTVMLDKQKELDSKVRNVKDKVMCIEHEIKSLEDLQDEYDFKCKTLQNREHETNGVAKSDQKQEQLLLKKMYLMLDNKRKEVVHKIIELLNVTELTQNALINDELVEWKRRQQSACIGGPPNACLDQLQNWFTIVAESLQQVRQQLKKLEELEQKYTYEHDPITKNKQVLWDRTFSLFQQLIQSSFVVERQPCMPTHPQRPLVLKTGVQFTVKLRLLVKLQELNYNLKVKVLFDKDVNERNTVKGFRKFNILGTHTKVMNMEESTNGSLAAEFRHLQLKEQKNAGTRTNEGPLIVTEELHSLSFETQLCQPGLVIDLETTSLPVVVISNVSQLPSGWASILWYNMLVAEPRNLSFFLTPPCARWAQLSEVLSWQFSSVTKRGLNVDQLNMLGEKLLGPNASPDGLIPWTRFCKENINDKNFPFWLWIESILELIKKHLLPLWNDGCIMGFISKERERALLKDQQPGTFLLRFSESSREGAITFTWVERSQNGGEPDFHAVEPYTKKELSAVTFPDIIRNYKVMAAENIPENPLKYLYPNIDKDHAFGKYYSRPKEAPEPMELDGPKGTGYIKTELISVSEVHPSRLQTTDNLLPMSPEEFDEVSRIVGSVEFDSMVSTTAGLCVALNKCVCSEAGSAPWQIPGLSAGGSPGGAKESAVLR

SEQ ID NO: 98724 - protein, 1564 aa, Homo sapiens
LECMFARTRSTSANGISAIQQGDKNKKFVYSHPKLKKLEEVVIEHFKSWNAENTTEKKRDETRVMIFSSFRDSVQEIAEMLSQHQPIIRVMTFVGHASGKSTKGFTQKEQLEIYNQSQSNKRSIYKAISSNRQVLHFYQRSPRMVPDGINPKLHKMFITHGVYEPEKPSRNLQRKSSIFSYRDGMRQSSLKKDWFLSEEEFKLWNRLYRLRDSDEIKEITLPQVQFSSLQNEENKPAQESTTGIHQLSLSEWRLWQDHPLPTHQVDHSDRCRHFIGLMQMIEGMRHEEGECSYELEVESYLQMEDVTSTFIAPRNESNNLASDTFITHKKSSFIKNINQGSSSSVIESDEECAEIVKQTHIKPTKIVSLKKKVSKEIKKDQLKKENNHGIIDSVDNDRNSTVENIFQEDLPNDKRTSDTDEIAATCTINENVIKEPCVLLTECQFTNKSTSSLAGNVLDSGYNSFNDEKSVSSNLFLPFEEELYIVRTDDQFYNCHSLTKEVLANVERFLSYSPPPLSGLSDLEYEIAKGTALENLLFLPCAEHLRSDKCTCLLSHSAVNSQQNLELNSLKCINYPSEKSCLYDIPNDNISDEPSLCDCDVHKHNQNENLVPNNRVQIHRSPAQNLVGENNHDVDNSDLPVLSTDQDESLLLFEDVNTEFDDVSLSPLNSKSESLPVSDKTAISETPLVSQFLISDELLLDNNSELQDQITRDANSFKSRDQRGVQEEKVKNHEDIFDCSRDLFSVTFDLGFCSPDSDDEILEHTSDSNRPLDDLYGRYLEIKEISDANYVSNQALIPRDHSKNFTSGTVIIPSNEDMQNPNYVHLPLSAAKNEELLSPGYSQFSLPVQKKVMSTPLSKSNTLNSFSKIRKEILKTPDSSKEKVNLQRFKEALNSTFDYSEFSLEKSKSSGPMYLHKSCHSVEDGQLLTSNESEDDEIFRRKVKRAKGNVLNSPEDQKNSEVDSPLHAVKKRRFPINRSELSSSDESENFPKPCSQLEDFKVCNGNARRGIKVPKRQSHLKHVARKFLDDEAELSEEDAEYVSSDENDESENEQDSSLLDFLNDETQLSQAINDSEMRAIYMKSLRSPMMNNKYKMIHKTHKNINIFSQIPEQDETYLEDSFCVDEEESCKGQSSEEEVCVDFNLITDDCFANSKKYKTRRAVMLKEMMEQNCAHSKKKLSRIILPDDSSEEENNVNDKRESNIAVNPSTVKKNKQQDHCLNSVPSGSSAQSKVRSTPRVNPLAKQSKQTSLNLKDTISEVSDFKPQNHNEVQSTTPPFTTVDSQKDCRKFPVPQKDGSALEDSSTSGASCSKSRPHLAGTHTSLRLPQEGKGTCILVGGHEITSGLEVISSLRAIHGLQVEVCPLNGCDYIVSNRMVVERRSQSEMLNSVNKNKFIEQIQHLQSMFERICVIVEKDREKTGDTSRMFRRTKSYDSLLTTLIGAGIRILFSSCQEETADLLKELSLVEQRKNVGIHVPTVVNSNKSEALQFYLSIPNISYITALNMCHQFSSVKRMANSSLQEISMYAQVTHQKAEEIYRYIHYVFDIQMLPNDLNQDRLKSDI

SEQ ID NO: 98725 - protein, 47 aa, Homo sapiens
MDPSYCPAHGFPSQDPLWPLSSQQWSSAHYSEPGLQAQGQHPTVSHH

SEQ ID NO: 98726 - protein, 1129 aa, Homo sapiens
MDKYQEQPHLLDPHLEWMMNLLLDIVQDQTSPASLVHLAFKFLYIITKVRGYKTFLRLFPHEVADVEPVLDLVTIQNPKDHEAWETRYMLLLWLSVTCLIPFDFSRLDGNLLTQPGQARMSIMDRILQIAESYLIVSDKARDAAAVLVSRFITRPDVKQSKMAEFLDWSLCNLARSSFQTMQGVITMDGTLQALAQIFKHGKREDCLPYAATVLRCLDGCRLPESNQTLLRKLGVKLVQRLGLTFLKPKVAAWRYQRGCRSLAANLQLLTQGQSEQKPLILTEDDDEDDDVPEGVERVIEQLLVGLKDKDTVVRWSAAKGIGRMAGRLPRALADDVVGSVLDCFSFQETDKAWHGGCLALAELGRRGLLLPSRLVDVVAVILKALTYDEKRGACSVGTNVRDAACYVCWAFARAYEPQELKPFVTAISSALVIAAVFDRDINCRRAASAAFQENVGRQGTFPHGIDILTTADYFAVGNRSNCFLVISVFIAGFPEYTQPMIDHLVTMKISHWDGVIRELAARALHNLAQQAPEFSATQVFPRLLSMTLSPDLHMRHGSILACAEVAYALYKLAAQENRPVTDHLDEQAVQGLKQIHQQLYDRQLYRGLGGQLMRQAVCVLIEKLSLSKMPFRGDTVIDGWQWLINDTLRHLHLISSHSRQQMKDAAVSALAALCSEYYMKEPGEADPAIQEELITQYLAELRNPEEMTRCGFSLALGALPGFLLKGRLQQVLTGLRAVTHTSPEDVSFAESRRDGLKAIARICQTVGVKAGAPDEAVCGENVSQIYCALLGCMDDYTTDSRGDVGTWVRKAAMTSLMDLTLLLARSQPELIEAHTCERIMCCVAQQASEKIDRFRAHAASVFLTLLHFDSPPIPHVPHRGELEKLFPRSDVASVNWSAPSQAFPRITQLLGLPTYRYHVLLGLVVSLGGLTESTIRHSTQSLFEYMKGIQSDPQALGSFSGTLLQIFEDNLLNERVSVPLLKTLDHVLTHGCFDIFTTEEDHPFAVKLLALCKKEIKNSKDIQKLLSGIAVFCEMVQFPGDVRRQALLQLCLLLCHRFPLIRKTTASQVYETLLTYSDVVGADVLDEVVTVLSDTAWDAELAVVREQRNRLCDLLGVPRPQLVPQPGAC

SEQ ID NO: 98727 - protein, 96 aa, Homo sapiens
  MOD_RES (1)..(1): Any amino acid
XFPRKAQPPQAFRGDGVPRVLGGQERPGPGPAHPGGAAHVAPQLQPPDHGDWTYEEQFKQLYELDGDPKRKEFLDDLFSFMQKRVQKLTRRGGRRL

SEQ ID NO: 98728 - protein, 590 aa, Homo sapiens
MEPLRAPALRRLLPPLLLLLLSLPPRARAKYVRGNLSSKEDWVFLTRFCFLSDYGRLDFRFRYPEAKCCQNILLYFDDPSQWPAVYKAGDKDCLAKESVIRPENNQVINLTTQYAWSGCQVVSEEGTRYLSCSSGRSFRSGDGLQLEYEMVLTNGKSFWTRHFSADEFGILETDVTFLLIFILIFFLSCYFGYLLKGRQLLHTTYKMFMAAAGVEVLSLLFFCIYWGQYATDGIGNESVKILAKLLFSSSFLIFLLMLILLGKGFTVTRGRISHAGSVKLSVYMTLYTLTHVVLLIYEAEFFDPGQVLYTYESPAGYGLIGLQVAAYVWFCYAVLVSLRHFPEKQPFYVPFFAAYTLWFFAVPVMALIANFGIPKWAREKIVNGIQLGIHLYAHGVFLIMTRPSAANKNFPYHVRTSQIASAGVPGPGGSQSADKAFPQHVYGNVTFISDSVPNFTELFSIPPPATSVSPAAPAPEELLAPPLEYLTPLPAPPPPPAPGPLSPPPAFRTPRAPTPRRDRPLAPAPTLPDWVLALLRTPPQTPCAVPPPPAFRGSPPAPRPPPEFAPRAPTPPFEYLAPLPRRPATQSFPD

SEQ ID NO: 98729 - protein, 199 aa, Homo sapiens
MKLFDASPTFFAFLLGHILAMEVLAWLLIYLLGPGWVPSALAAFILAISQAQSWCLQHDLGHASIFKKSWWNHVAQKFVMGQLKGFSAHWWNFRHFQHHAKPNIFHKDPDVTVAPVFLLGESSVEYGKKKRRYLPYNQQHLYFFLIGPPLLTLVNFEVENLAYMLVCMQWADLLWAASFYARFFLSYLPFYGVPGVLLF

SEQ ID NO: 98730 - protein, 213 aa, Homo sapiens
MQPDPRPSGAGACCRFLPLQSQCPEGAGDAVMYASTECKAEVTPSQHGNRTFSYTLEDHTKQAFGIMNELRLSQQLCDVTLQVKYQDAPAAQFMAHKVVLASSSPVFKAMFTNGLREQGMEVVSIEGIHPKVMERLIEFAYTASISMGEKCVLHVMNGAVMYQIDSVVRACSDFLVQQLDPSNAIGIANFAEQIGCVELHQRAREYIYMHFGE

SEQ ID NO: 98731 - protein, 144 aa, Homo sapiens
  MOD_RES (1)..(1): Any amino acid
XYDYVWDTVFHPSGAIEIRFYATGYISSAFLFGATGKYGNQVSEHTLGTVHTHSAHFKVDLDVAGDPEAAGDGGAGRLPRGKRHPSLPVPGQQPQQQVGSPPGLPHPDAQLCWRAAAPKQLHGERLQLGEVPAGCDPAEGGGAQ

SEQ ID NO: 98732 - protein, 36 aa, Homo sapiens
MYMQDYWRTWLKGLRGFFFVGVLFSAVSIAAFCTFL

SEQ ID NO: 98733 - protein, 54 aa, Homo sapiens
MSENLDKSNVNEAGKSKSNDSEEGLEDAVEGADEALQKAIKSDSSSPQRVQRPH

SEQ ID NO: 98734 - protein, 322 aa, Homo sapiens
APHQPAQPFKFTISESCDRIKEEFQFLQAQYHSLKLECEKLASEKTEMQRHYVMYYEMSYGLNIEMHKQAEIVKRLNAICAQVIPFLSQEHQQQVVQAVERAKQVTMAELNAIIGQQLQAQHLSHGHGLPVPLTPHPSGLQPPAIPPIGSSAGLLALSSALGGQSHLPIKDEKKHHDNDHQRDRDSIKSSSVSPSASFRGAEKHRNSADYSSESKKQKTEEKEIAARYDSDGEKSDDNLVVDVSNEKRDMGKLSETRLSEDEQCTLGLQRWFCRLWFMNEKSTTPVSKSNTPTPRTDAPTPGSNSTPGLRPVPGKPPGVDPL

SEQ ID NO: 98735 - protein, 426 aa, Homo sapiens
MRECISVHVGQAGVQIGNACWELFCLEHGIQADGTFDAQASKINDDDSFTTFFSETGNGKHVPRAVMIDLEPTVVDEVRAGTYRQLFHPEQLITGKEDAANNYARGHYTVGKESIDLVLDRIRKLTDACSGLQGFLIFHSFGGGTGSGFTSLLMERLSLDYGKKSKLEFAIYPAPQVSTAVVEPYNSILTTHTTLEHSDCAFMVDNEAIYDICRRNLDIERPTYTNLNRLISQIVSSITASLRFDGALNVDLTEFQTNLVPYPRIHFPLVTYAPIISAEKAYHEQLSVAEITSSCFEPNSQMVKCDPRHGKYMACCMLYRGDVVPKDVNVAIAAIKTKRTIQFVDWCPTGFKVGINYQPPTVVPGGDLAKVQRAVCMLSNTTAIAEAWARLDHKFDLMYAKRAFVHWARWLTPVIPALWEAEVGGS

SEQ ID NO: 98736 - protein, 182 aa, Homo sapiens
MLNTPETLQCSAKDSKHFIPKECSIPGENRPPSDTGKTVKIYNEKELLQGKLDLLSDTNMVDFAMDVYKNLYSDDIPHALREKRTTVVAQLKQLQAETEPIVKMFEDPETTRQMQSTRDGRMLFDYLADKHGFRQEYLDTLYRYAKFQYECGNYSGAAEYLYFFRVLMESCYVAQADLKLLA

SEQ ID NO: 98737 - protein, 165 aa, Homo sapiens
MRRRLWLGLAWLLLARAPDAAGTPSASRGPRSYPHLEGDVRWRRLFSSTHFFLRVDPGGRVQGTRWRHGQDSILEIRSVHVGVVVIKAVSSGFYVAMNRRGRLYGSVPGAHRRERPQHLRLTALAPPRPAHVPGAGQEGGAPARRPDAAVPPVRPLPARPGLLRP

SEQ ID NO: 98738 - protein, 269 aa, Homo sapiens
  MOD_RES (1)..(1): Any amino acid
XGYEISLGLMPKSIGPLTFVFTGTGNVSKGAQAIFNELPCEYVEPHELKEVSQTGDLRKVYGTVLSRHHHLVRKTDAVYDPAEYDKHPERYISRFNTDIAPYTTCLINGIYWEQNTPRLLTRQDAQSLLAPGKFSPAGVEGCPALPHKLVAICDISADTGGSIEFMTECTTIEHPFCMYDADQHIIHDSVEGSGILMCSIDNLPAQLPIEATECFGDMLYPYVEEMILSDATQPLESQNFSPVVRDGTCSVTFNGHQEKGFGSWIWLHI

SEQ ID NO: 98739 - protein, 739 aa, Homo sapiens
METKENRWVPVTVLPGCVGCRTVAALASWTVRDVKERIFAETGFPVSEQRLWRGGRELSDWIKIGDLTSKNCHLFVNLQSKGLKGGGRFGQTTPPLVDFLKDILRRYPEGGQILKELIQNAEDAGATEVKFLYDETQYGTETLWSKDMAPYQGPALYVYNNAVFTPEDWHGIQEIARSRKKDDPLKVGRFGIGFNSVYHITDVPCIFSGDQIGMLDPHQTLFGPHESGQCWNLKDDSKEISELSDQFAPFVGIFGSTKETFINGNFPGTFFRFPLRLQPSQLSSNLYNKQKVLELFESFRADADTVLLFLKSVQDVSLYVREADGTEKLVFRVTSSESKALKHERPNSIKILGTAISNYCKKTPSNNITCVTYHVNIVLEEESTKDAQKTSWLVCNSVGGRGISSKLDSLADELKFVPIIGIAMPLSSRDDEAKGATSDFSGKAFCFLPLPPGEESSTGLPVHISGFFGLTDNRRSIKWRELDQWRDPAALWNEFLVMNVVPKAYATLILDSIKRLEMEKSSDFPLSVDVIYKLWPEASKVKVHWQPVLEPLFSELLQNAVIYSISCDWVRLEQVYFSELDENLEYTKTVLNYLQSSGKQIAKVPGNVDAAVQLTAASGTTPVRKVTPAWVRQVLRKCAHLGCAEEKLHLLEFVLSDQAYSELLGLELLPLQNGNFVPFSSSVSDQDVIYITSAEYPRSLFPSLEGRFILDNLKPHLVAALKEAAQTRGTWITWSQRRS

SEQ ID NO: 98740 - protein, 99 aa, Homo sapiens
MMFNNDLMADVHFVVGPPGGTQRLPGHKYVLAVGSSVFHAMFYGELAEDKDEIRIPDVEPAAFLAMLKYIYCDEIDLAADTVLATLYAAKKYIVPHLAR

SEQ ID NO: 98741 - protein, 72 aa, Homo sapiens
MDNSNIVAMFEMMDSSGRGTISFVQYKEALKTLGLCTEDEDLQDDGHKITLDKFKEEVCIHPASLQAFARKF

SEQ ID NO: 98742 - protein, 39 aa, Homo sapiens
MATEGMILTNHDHQIRVGVLTVGMEFHRVSQDGLDLLTL

SEQ ID NO: 98743 - protein, 90 aa, Homo sapiens
MPKRKVSSAEGAAKEEKPPAKVEAKPKKAAAKDKSSDKKVQTKGKRGAKGKQAEVANQETKEDLPAENGETKTEESPASDEAGEKEAKSD

SEQ ID NO: 98744 - protein, 89 aa, Homo sapiens
NSEGGLYVCMNTFLAFGREHVERHFRKTGQSVYMHLKRHVREVTIACDAVLSSKSPYRKQDPDTWENELPVSKYANNLTQLDNGVRIPP

SEQ ID NO: 98745 - protein, 280 aa, Homo sapiens
  MOD_RES (1)..(1): Any amino acid
XAYATPGAYGDIRPSAASWVGSRGLAYPARPAQLRRRASVRGSSEEDEDARTPDRATQGPGLAARRWWAASPAPARLPSSLLGPDPRPGLRATRAGPAGAARARPEVGRRLERWLSRLLLWASLGLLLVFLGILWVKMGKPSAPQEAEDNSNFECGNPENLKSKCIPVMEAQEYIANVTSSSSAKFEAALTWILSSNKDVGIWLKGEDQSELVTTVDKVVCLESAHPRMGVGCRLSRALLTAVTNVLIFFWCLAFLWGLLILLKYRWRKLEEEEQAMYEM

SEQ ID NO: 98746 - protein, 84 aa, Homo sapiens
  MOD_RES (1)..(1): Any amino acid
XDLTEQQGRKELEGLQQLLQNVKSELEMAQEDLSMTQKDKFMLQAKVSELKNNMKTLLQQNQQLKLDLRRGAAKTVLRPASLPG

SEQ ID NO: 98747 - protein, 104 aa, Homo sapiens
MRALRRLIQGRILLLTICAAGIGGTFQFGYNLSIINAPTLHIQEFTNETWQARTGEPLPDHLVLLMWSLIVSLYPLGGLFGALLAGPLAITLGRPTSKYRCIGN

SEQ ID NO: 98748 - protein, 232 aa, Homo sapiens
MGAERRLLSIKEAFRLAQQPHQNQAKLVVALSRTYRTMDDKTVFHEEFIHYLKYVMVVYKREPAVERVIEFAAKFVTSFHQSDMEDDEEEEDGGLLNYLFTFLLKSHEANSNAVRFRVCLLINKLLGSMPENAQIDDDVFDKINKAMLIRLKDKIPNVRIQAVLALSRLQDPKDDECPVVNAYATLIENDSNPEVRRAVLSCIAPSAKTLPKIVGRTKDVKEAVRKLAYQML

SEQ ID NO: 98749 - protein, 177 aa, Homo sapiens
MSCPCFCPVALRMDTMMLNVRNLFEQLVRRVEILSEGNEVQFIQLAKDFEDFRKKWQRTDHELGKYKDLLMKAETERSALDVKLKHARNQVDVEIKRRQRAEADCEKLERQIQLIREMLMCDTSGSIQLSEEQKSALAFLNRGQPSSSNAGNKRLSTIDESGSILSDISFDKTDESL

SEQ ID NO: 98750 - protein, 217 aa, Homo sapiens
MGSMFRSEEVALVQLFLPTAAAYTCVSRLGELGLVEFRDLNASVSAFQRRFVVDVRRCEELEKTFTFLQEEVRRAGLVLPPPKGRLPAPPPRDLLRIQEETERLAQELRDVRGNQQALRAQLHQLQLHAAVLRQGHEPQLAAAHTDGASERTPLLQAPGGPHQDLRVNFVAGAVEPHKAPALERLLWRACRGFLIASFRELEQPLEHPVTGEPATWM

SEQ ID NO: 98751 - protein, 30 aa, Homo sapiens
MSLADLTKTNIDEHFFGVALENNRRSAACK

SEQ ID NO: 98752 - protein, 295 aa, Homo sapiens
MWLAAAAPSLARRLLFLGPPPPPLLLLVFSRSSRRRLHSLGLAAMPEKRPFERLPADVSPINYSLCLKPDLLDFTFEGKLEAAAQVRQATNQIVMNCADIDIITASYAPEGDEEIHATGFNYQNEDEKVTLSFPSTLQTGTGTLKIDFVGELNDKMKGFYRSKYTTPSGEVRYAAVTQFEATDARRAFPCWDEPAIKATFDISLVVPKDRVALSNMNVIDRKPYPDDENLVEVKFARTPVMSTYLVAFVVGEYDFVETRSKDGVCVRVYTPVGKAEQGKFALEVNVLEEDCSNSP

SEQ ID NO: 98753 - protein, 118 aa, Homo sapiens
MEEQAQSLIDKTTAAFQQGKIPPTPFSAPPPAGAMIPPPPSLPGPPRPGMMPAPHMGGPPMMPMMGPPPPGMMPVGPAPGMRPPMGGHMPMMPGPPMMRPPARPMMVPTRPGMTRPDR

SEQ ID NO: 98754 - protein, 191 aa, Homo sapiens
MMAAGAALALALWLLMPPVEVGGAGPPPIQDGEFTFLLPAGRKQCFYQSAPANASLETEYQVIGGAGLDVDFTLESPQGVLLVSESRKADGVHTTISEKLVFFELIFDSLQDDEEVEGWAEAVEPEEMLDVKMEDIKESIETMRTRLERSIQMLTLLRAFEARDRNLQEGNLERVNFWSAVNVAVLLLVAV

SEQ ID NO: 98755 - protein, 41 aa, Homo sapiens
MWQPATERLQDGCCNSSHNTLVPQYPWGIDSGPLVNTKIYR

SEQ ID NO: 98756 - protein, 928 aa, Homo sapiens
MRNLKLFRTLEFRDIQGPGNPQCFSLRTEQGTVLIGSEHGLIEVDPVSREVKNEVSLVAEGFLPEDGSGRIVGVQDLLDQESVCVATASGDVILCSLSTQQLECVGSVASGISVMSWSPDQELVLLATGQQTLIMMTKDFEPILEQQIHQDDFGESKFITVGWGRKETQFHGSEGRQAAFQMQMHESALPWDDHRPQVTWRGDGQFFAVSVVCPETGARKVRVWNREFALQSTSEPVAGLGPALAWKPSGSLIASTQDKPNQQDIVFFEKNGLLHGHFTLPFLKDEVKVNDLLWNADSSVLAVWLEDLQREESSIPKTCVQLWTVGNYHWYLKQSLSFSTCGKSKIVSLMWDPVTPYRLHVLCQGWHYLAYDWHWTTDRSVGDNSSDLSNVAVIDGNRVLVTVFRQTVVPPPMCTYQLLFPHPVNQVTFLAHPQKSNDLAVLDASNQISVYKCGDCPSADPTVKLGAVGGSGFKVCLRTPHLEKRYKIQFENNEDQDVNPLKLGLLTWIEEDVFLAVSHSEFSPRSVIHHLTAASSEMDEEHGQLNVSSSAAVDGVIISLCCNSKTKSVVLQLADGQIFKYLWESPSLAIKPWKNSGGFPVRFPYPCTQTELAMIGEEECVLGLTDRCRFFINDIEVASNITSFAVYDEFLLLTTHSHTCQCFCLRDASFKTLQAGLSSNHVSHGEVLRKVERGSRIVTVVPQDTKLVLQMPRGNLEVVHHRALVLAQIRKWLDKLMFKEAFECMRKLRINLNLIYDHNPKVFLGNVETFIKQIDSVNHINLFFTELKEEDVTKTMYPAPVTSSVYLSRDPDGNKIDLVCDAMRAVMESINPHKYCLSILTSHVKKTTPELEIVLQKVHELQGNAPSDPDAVSAEEALKYLLHLVDVNELYDHSLGTYDFDLVLMVAEKSQKFSLIIFLGSQRISSIS

SEQ ID NO: 98757 - protein, 47 aa, Homo sapiens
MTGIAAASFFSNTCRFGGCGLHFPTLADLIEHIEDNHIDSQVHQAHT

SEQ ID NO: 98758 - protein, 617 aa, Homo sapiens
MYFRSLPPRRSYLHKRCSYHSQYKMATVFSDIVGSPDRDGIKKSNGAPNGFYAEIDWERYNSPELDEEGYSIRPEEPGSTKGKHFYSSSESEEEEESHKKFNIKIKPLQSKDILKNAATVDELKASIGNIALSPSPVGAIKRNLSSEEVARPRRSTPTPELISKKPPDDTTALAPLFGPPLESAFDEQKTEVLLDQPEIWGSGQPINPSMESPKLTRPFPTGTPPPLPPKNVPATPPRTGSPLTIGPGASSPARPATPLVPCRSTTPPPPPPRPPSRPKLPPGKPGVGDVSRPFSPPIHSSSPPPIAPLARAESTSSISSTNSLSAATTPTVGSSRGPSPLTMGAQDTLPVAAAFTETVNAYFKGADPSKCIVKITGEMVLSFPAGITRHFANNPSPAALTFRVINFSRLEHVLPNPQLLCCDNTQNDANTKEFWVNMPNLMTHLKKVSEQKPQATYYNVDMLKYQVSAQGIQSTPLNLAVNWRCEPSSTDLRIDYKYNTDAMTTAVALNNVQFLVPIDGGVTKLQAVLPPAVWNAEQQRILWKIPDISQKSENGGVGSLLARFQLSEGPSKPSPLVVQFTSEGSTLSGCDIELVGAGYRFSLIKKRFAAGKYLADN

SEQ ID NO: 98759 - protein, 115 aa, Homo sapiens
  MOD_RES (1)..(1): Any amino acid
XAINILKEMKEKDVLIKDTTALSFFHMLNGAALRGEIETVKQLHEAIVTLGLAEPSTNISFPLVTVHLEKGDLSTALEVAIDCYEKYKVLPRIHDVLCKLVEKGETDLIQKDSRD

SEQ ID NO: 98760 - protein, 59 aa, Homo sapiens
MEEEIAALVIDNGSGMCKAGFAGDDAPRAVFPSIVGASWWAWARRTPTWATRPRASVAS

SEQ ID NO: 98761 - protein, 154 aa, Homo sapiens
MSLWGLVSKMPPEKVQRLYVDFPQHLRHLLGDWLESQPWEFLVGSDAFCCNLASALLSDTVQHLQASVGEQGEGSTILQHISTLESIYQRDPLKLVATFRQILQGEKKAVMEQFRHLPMPFHWKQEELKFKTGLRRLQHRVGEIHLLREALQKG

SEQ ID NO: 98762 - protein, 645 aa, Homo sapiens
MRQEVCLTSFHLNWGYSDRHDMTQGLGIDADLGVRTSTPPSSARNTFMRVCVAQGWPRDPSLTSMPVFFSAGSTSSSLCEHWVSRLPGSKPASVTSAASSRRTSLASLSESVEMTGERSEDDGGFSTRPFVRSVQRQSLSSRSSVTSPLAVNENCMRPSWSLSAKLQMRSNSPSRFSGDSPIHSSASTLEKIGEAADDKVSISCFGSLRNLSSSYQEPSDSHSRREHKAVGRAPLAVMEGVFKDESDTRRLNSSVVDTQSKHSAQGDRLPPLSGPFDNNNQIAYVDQSDSVDSSPVKEVKAPSHPGSLAKKPESTTKRSPSSKGTSEPEKSLRKGRPALASQESSLSSTSPSSPLPVKVSLKPSRSRSKADSSSRGSGRHSSPAPAQPKKESSPKSQDSVSSPSPQKQKSASALTYTASSTSAKKASGPATRSPFPPGKSRTSDHSLSREGSRQSLGSDRASATSTSKPNSPRVSQARAGEGRGAGKHVRSSSMASLRSPSTSIKSGLKRDSKSEDKGLSFFKSALRQKETRRSTDLGKTALLSKKAGGSSVKSVCKNTGDDEAERGHQPPASQQPNANTTGKEQLVTKDPASAKHSLLSARKSKSSQLDSGVPSSPGGRQSAEKSSKKLSSSMQTSARPSQKPQ

SEQ ID NO: 98763 - protein, 29 aa, Homo sapiens
MSRPRFNPRGDFPLQRPRAPNPSGMRPPG

SEQ ID NO: 98764 - protein, 227 aa, Homo sapiens
  MOD_RES (1)..(1): Any amino acid
XVVALLETGTASEEERGSTDKARHFLESAAPLAMDPYSCALTTYALTLLRSPAAPEALRKLRSLAIMRDGVTHWSLSNSWDVDKGTFLSFSDRVSQSVVSAEVEMTAYALLTYTLLGDVAAALPVVKWLSQQRNALGGFSSTQDTCVALQALAEYAILSYAGGINLTVSLASTNLDYQETFELHRTNQKVLQTAAIDVTYNVPDPVAKPAFQLLVSLQEPEAQGRPP

SEQ ID NO: 98765 - protein, 545 aa, Homo sapiens
MSKFRGLRYMSLAFKIFFPQTLRALSRKELCLFRKHHWRDVRQFSQWSETDLLHGHPLFLRRKPVLSFQGSHLRSRATYLVFLPGLHVGLCSGPCEMAEQRFCVDYAKRGTAGCKKCKEKIVKGVCRIGKVVPNPFSESGGDMKEWYHIKCMFEKLERARATTKKIEDLTELEGWEELEDNEKEQITQHIADLSSKAAGTPKKKAVVQAKLTTTGQVTSPVKGASFVTSTNPRKFSGFSAKPNNSGEAPSSPTPKRSLSSSKCDPRHKDCLLREFRKLCAMVADNPSYNTKTQIIQDFLRKGSAGDGFHGDVYLTVKLLLPGVIKTVYNLNDKQIVKLFSRIFNCNPDDMARDLEQGDVSETIRVFFEQSKSFPPAAKSLLTIQEVDEFLLRLSKLTKEDEQQQALQDIASRCTANDLKCIIRLIKHDLKMNSGAKHVLDALDPNAYEAFKASRNLQDVVERVLHNAQEVEKEPGQRRALSVQASLMTPVQPMLAEACKSVEYAMKKCPNGMFSEIKYDGERVQVHKNGDHFSYFSRSLKPVLPH

SEQ ID NO: 98766 - protein, 378 aa, Homo sapiens
QKIRDQLPSWIDQERSWAVATLKIALPSLYQTLCFEDAALWRTYYNNSMCEQEFPSILAKKVSLFQQILVVQALRPDRLQSAMALFACKTLGLKEVSPLPLNLKRLYKETLEIEPILIIISPGADPSQELQELANAERSGECYHQVAMGQGQADLAIQMLKECARNGDWLCLKNLHLVVSWLPVLEKELNTLQPKDTFRLWLTAEVHPNFTPILLQSSLKITYESPPGLKKNLMRTYESWTPEQISKKDNTHRAHALFSLAWFHAACQERRNYIPQGWTKFYEFSLSDLRAGYNIIDRLFDGAKDVQWEFVHGLLENAIYGGRIDNYFDLRVLQSYLKQFFNSSVIDVFNQRNKKSIFPYSVSLPQSCSILVGLSCCH

SEQ ID NO: 98767 - protein, 312 aa, Homo sapiens
MLVVEVANGRSLVWGAEAVQALRERLGVGGRTVGALPRGPRQNSRLGLPLLLMPEEARLLAEIGAVTLVSAPRPDSRHHSLALTSFKRQQEESFQEQSALAAEARETRRQELLEKITEGQAAKKQKLEQASGASSSQEAGSSQAAKEDETSDGQASGEQEEAGPSSSQAGPSNGVAPLPRSALLVQLATARPRPVKARPLDWRVQSKDWPHAGRPAHELRYSIYRDLWERGFFLSAAGKFGGDFLVYPGDPLRFHAHYIAQCWAPEDTIPLQDLVAAGRLGTSVRKTLLLCSPQPDGFKSQEVSINLVYKCS

SEQ ID NO: 98768 - protein, 192 aa, Homo sapiens
MWKCELTEFVNTLQRQSNGIFPGREKLKKMKTGRSALVVTDTGDMSVLNSPRHQSCIMHVDMDCFFVSVGIRNRPDLKGKPVAVTSNRGTGRAPLRPGANPQLEWQYYQNKILKGKADIPDSSLWENPDSAQANGIDSVLSRAEIASCSYEARSLKVLEPWLLPRVMSYHVQCCWHLNHCGATSGAWNWSIG

SEQ ID NO: 98769 - protein, 89 aa, Homo sapiens
DFETWDSYSPQGRRPETQGPKYCHSSFDAITVDRQQQLYIFKGSHFWEVAADGNVSEPRPLQERWVGLPPNIEAAAVSLNDGDFYFFKA

SEQ ID NO: 98770 - protein, 181 aa, Homo sapiens
MHTGGETSACKPSSVRLAPSFSFHAAGLQMAGQMPHSHQYSDRRQPNISDQQVSALSYSDQIQQPLTNQVMPDIVMLQRRMPQTFRDPATAPLRKLSVDLIKTYKHINEVYYAKKKRRHQQGQGDDSSHKKERKVYNDGYDDDNYDYIVKNGEKWMDRYEIDSLIGKGSFGQVVKAYDRVE

SEQ ID NO: 98771 - protein, 36 aa, Homo sapiens
MNGKRNGEGGKRWKWKGTGVPVRSGDATFPKAMDNV

SEQ ID NO: 98772 - protein, 268 aa, Homo sapiens
MEAPEEPAPVRGGPEATLEVRGSRCLRLSAFREELRALLVLAGPAFLVQLMVFLISFISSVFCGHLGKLELDAVTLAIAVINVTGVSVGFGLSSACDTLISQTYGSQNLKHVGVILQRSALVLLLCCFPCWALFLNTQHILLLFRQDPDVSRLTQTYVTIFIPALPAQVHANLKVNNVPRSGNSALPQDPLHPGCPENLEGILTNDVGKTGEPQSDQQMRQEEPLPEHPQDGAKLSRKQLVLRRGLLLLGVFLILLVGILVRFYVRIQ

SEQ ID NO: 98773 - protein, 704 aa, Homo sapiens
  MOD_RES (1)..(1): Any amino acid
XIIHKYEPSKEGQEKGWLSIDGFTNYLMSPDCYIFDPEHKKVCQDMKQPLSHYFINSSHNTYLIEDQFRGPSDITGYIRALKMGCRSVELDVWDGPDNEPVIYTGHTMTSQIVFRSVIDIINKYAFFASEYPLILCLENHCSIKQQKVMVQHMKKLLGDKLYTTSPNVEESYLPSPDVLKGKILIKAKKLSSNCSGVEGDVTDEDEGAEMSQRMGKENMEQPNNVPVKRFQLCKELSELVSICKSVQFKEFQVSFQVQKYWEVCSFNEVLASKYANENPGDFVNYNKRFLARVFPSPMRIDSSNMNPQDFWKCGCQIVAMNFQTPGLMMDLNIGWFRQNGNCGYVLRPAIMREEVSFFSANTKDSVPGVSPQLLHIKIISGQNFPKPKGSGAKGDVVDPYVYVEIHGIPADCAEQRTKTVHQNGDAPIFDESFEFQINLPELAMVRFVVLDDDYIGDEFIGQYTIPFECLQTGYRHVPLQSLTGEVLAHASLFVHVAITNRRGGGKPHKRGLSVRKGKKSREYASLRTLWIKTVDEVFKNAQPPIRDATDLRENMQNAVVSFKELCGLSSVANLMQCMLAVSPRFLGPDNTPLVVLNLSEQYPTMELQGIVPEVLKKIVTTYDMMIQSLKALIENADAVYEKIVHCQKAAMEFHEHLHSIGTKEGLKERKLQKAVESFTWNITILKIRKTGRRSIFVPQTPIMV

SEQ ID NO: 98774 - protein, 2127 aa, Homo sapiens
MEAEFYMVILTCLIFRNSEGFQIVHVQKQQCLFKNEKVVVGSCNRTIQNQQWMWTEDEKLLHVKSALCLAISNSSRGPSRSAILDRCSQAPRWTCYDQEGFLEVENASLFLQKQGSRVVVKKARKYLHSWMKIDVNKEGKLVNESLCLQKAGLGAEVSVRSTRNTAPPQILTTFNAVPDGLVFLIRNTTEAFIRNAAENYSQNSSERQHPNLHMTGITDTSWVLSTTQPFSSTTEETGLAEPERCNFTLAESKASSHSVSIQWRILGSPCNFSLIYSSDTLGAALCPTFRIDNTTYGCNLQDLQAGTIYNFRIISLDEERTVVLQTDPLPPARFGVSKEKTTSTSLHVWWTPSSGKVTSYEVQLFDENNQKIQGVQIQESTSWNEYTFFNLTAGSKYNIAITAVSGGKRSFSVYTNGSTVPSPVKDIGISTKANSLLISWSHGSGNVERYRLMLMDKGILVHGGVVDKHATSYAFHGLTPGYLYNLTVMTEAAGLQNYRWKLVRTAPMEVSNLKVTNDGSLTSLKVKWQRPPGNVDSYNITLSHKGTIKESRVLAPWITETHFKELVPGRLYQVTVSCVSGELSAQKMAVGRTFPDKVANLEANNNGRMRSLVVSWSPPAGDWEQYRILLFNDSVVLLNITVGKEETQYVMDDTGLVPGRQYEVEVIVESGNLKNSERCQGRTVPLAVLQLRVKHANETSLSIMWQTPVAEWEKYIISLADRDLLLIHKSLSKDAKEFTFTDLVPGRKYMATVTSISGDLKNSSSVKGRTVPAQVTDLHVANQGMTSSLFTNWTQAQGDVEFYQVLLIHENVVIKNESISSETSRYSFHSLKSGSLYSVVVTTVSGGISSRQVVVEGRTVPDKVQGVSVSNSARSDYLRVSWVHATGDFDHYEVTIKNKNNFIQTKSIPKSENECVFVQLVPGRLYSVTVTTKSGQYEANEQGNGRTIPEPVKDLTLRNRSTEDLHVTWSGANGDVDQYEIQLLFNDMKVFPPFHLVNTATEYRFTSLTPGRQYKILVLTISGDVQQSAFIEGFTVPSAVKNIHISPNGATDSLTVNWTPGGGDVDSYTVSAFRHSQKVDSQTIPKHVFEHTFHRLEAGEQYQIMIASVSGSLKNQINVVGRTVPASVQGVIADNAYSSYSLIVSWQKAAGVAERYDILLLTENGILLRNTSEPATTKQHKFEDLTPGKKYKIQILTVSGGLFSKEAQTEGRTVPAAVTDLRITENSTRHLSFRWTASEGELSWYNIFLYNPDGNLQERAQVDPLVQSFSFQNLLQGRMYKMVIVTHSGELSNESFIFGRTVPASVSHLRGSNRNTTDSLWFNWSPASGDFDFYELILYNPNGTKKENWKDKDLTEWRFQGLVPGRKYVLWVVTHSGDLSNKVTAESRTAPSPPSLMSFADIANTSLAITWKGPPDWTDYNDFELQWLPRDALTVFNPYNNRKSEGRIVYGLRPGRSYQFNVKTVSGDSWKTYSKPIFGSVRTKPDKIQNLHCRPQNSTAIACSWIPPDSDFDGYSIECRKMDTQEVEFSRKLEKEKSLLNIMMLVPHKRYLVSIKVQSAGMTSEVVEDSTITMIDRPPPPPPHIRVNEKDVLISKSSINFTVNCSWFSDTNGAVKYFTVVVREADGSDELKPEQQHPLPSYLEYRHNASIRVYQTNYFASKCAENPNSNSKSFNIKLGAEMESLGGKCDPTQQKFCDGPLKPHTAYRISIRAFTQLFDEDLKEFTKPLYSDTFFSLPITTESEPLFGAIEGVSAGLFLIGMLVAVVALLICRQKVSHGRERPSARLSIRRDRPLSVHLNLGQKGNRKTSCPIKINQFEGHFMKLQADSNYLLSKEYEELKDVGRNQSCDIALLPENRGKNRYNNILPYDATRVKLSNVDDDPCSDYINASYIPGNNFRREYIVTQGPLPGTKDDFWKMVWEQNVHNIVMVTQCVEKGRVKCDHYWPADQDSLYYGDLILQMLSESVLPEWTIREFKICGEEQLDAHRLIRHFHYTVWPDHGVPETTQSLIQFVRTVRDYINRSPGAGPTVVHCSAGVGRTGTFIALDRILQQLDSKDSVDIYGAVHDLRLHRVHMVQTECQYVYLHQCVRDVLRARKLRSEQENPLFPIYENVNPEYHRDPVYSRH

SEQ ID NO: 98775 - protein, 250 aa, Homo sapiens
MEAMAASTSLPDPGDFDRNVPRICGVCGDRATGFHFNAMTCEGCKGFFRRSMKRKALFTCPFNGDCRITKDNRRHCQACRLKRCVDIGMMKEFILTDEEVQRKREMILKRKEEEALKDSLRPKLSEEQQRIIAILLDAHHKTYDPTYSDFCQFRPPVRVNDGGGSHPSRPNSRHTPSFSGDSSSSCSDHCITSSDMMDSSSFSNLDLSEEDSDDPSVTLELSQLSMLPHLADLVSYSIQKVIGFAKMIPG

SEQ ID NO: 98776 - protein, 222 aa, Homo sapiens
  MOD_RES (1)..(1): Any amino acid
XPASGDGFEPQMVKSPSFGGASEASARTPPQVVQPSPSLSTFFGDTAASHSLASDFFDSFTTSAFISVSNPGAGSPAPASPPPLAVPGTEGRPEPVAMRGPQAAAPPASPEPFAHIQAVFAGSDDPFATALSMSEMDRRNDAWLPGEATRGVLRAVATQQRGAVFVDKENLTMPGLRFDNIQGDAVKDLMLRFLGEKAAAKRQVLNADSVEQSFVGLKQLIR

SEQ ID NO: 98777 - protein, 83 aa, Homo sapiens
MAAQQRDCGGAAQLAGPAAEADPLGRFTCPVCLEVYEKPVQVPCGHVALPSPVMIAAPVCGAFCKGWTLCQGSAIQTVSSQQS

SEQ ID NO: 98778 - protein, 444 aa, Homo sapiens
GVVVGVGGAVGVGGCCSGPGHSKRRRQAPGVGAVGGGSPEREEVGAGYNSEDEYEAAAARIEAMDPATVEQQEHWFEKALRDKKGFIIKQMKEDGACLFRAVADQVYGDQDMHEVVRKHCMDYLMKNADYFSNYVTEDFTTYINRKRKNNCHGNHIEMQAMAEMYNRPVEVYQYSTGTSAVEPINTFHGIHQNEDEPIRVSYHRNIHYNSVVNPNKATIGVGLGLPSFKPGFAEQSLMKNAIKTSEESWIEQQMLEDKKRATDWEATNEAIEEQVARESYLQWLRDQEKQARQVRGPSQPRKASATCSSATAAASSGLEEWTSRSPRQRSSASSPEHPELHAELGMKPPSPGTVLALAKPPSPCAPGTSSQFSAGADRATSPLVSLYPALECRALIQQMSPSAFGLNDWDDDEILASVLAVSQQEYLDSMKKNKVHRDPPPDKS

SEQ ID NO: 98779 - protein, 36 aa, Homo sapiens
  MOD_RES (1)..(1): Any amino acid
XGPAWISKVSRLLGAFHNPKQVTRGFTGGINFAKLM

SEQ ID NO: 98780 - protein, 113 aa, Homo sapiens
MDSELMHSIVGSYHKPPERVFVPSFTQNEPSQNCHPANLEVTSPKILHSPNSQALILALKTLQEKIHRLELERTQAEDNLNILSREAAQYKKALENETNERNLAHQELIKQKK

SEQ ID NO: 98781 - protein, 115 aa, Homo sapiens
  MOD_RES (1)..(1): Any amino acid
XFSRVPLFPVFDLSYFIVSILYLKYEPGAVELSRRHPIASWLCAMLHCFGSYILADLLLGEPLIDYFSNNSSILLASAVWYLIFFCPLDLFYKCVCFLPVKLIFVAMKEVEVAVS

SEQ ID NO: 98782 - protein, 217 aa, Homo sapiens
MSYNYVVTAQKPTAVNGCVTGHFTSAEDLNLLIAKNTRLEIYVVTAEGLRPVKEVGMYGKIAVMELFRPKGESKDLLFILTAKYNACILEYKQSGESIDIITRAHGNVQDRIGRPSETGIIGIIDPECRMIGLRLYDGLFKVIPLDRDNKELKAFNIRLEELHVIDVKFLYGCQAPTICFVYQSLTLLPRPECDGLILAHCNLRLLVQAILLPQPPE

SEQ ID NO: 98783 - protein, 145 aa, Homo sapiens
MDPEEQELLNDYRYRSYSSVIEKALRNFESSSEWADLISSLGKLNKALQSNLRYSLLPRRLLISKRLAQCLHPALPSGVHLKALETYEIIFKIVGTKWLAKDLFLYSCGLFPLLAHAAVSVRPVLLTLYEKYFLPLQKLLLPSLQ

SEQ ID NO: 98784 - protein, 115 aa, Homo sapiens
  MOD_RES (1)..(1): Any amino acid
XVRAGARLVEVALCSFTVTCLEVMRRFLLLYATQQGQAKAIAEEICEQAVVHGFSADLHCISESDKYDLKTETAPLVVVVSTTGTGDPPDTARKFVKEIQNQTLPVDFFAHLRSR

SEQ ID NO: 98785 - protein, 58 aa, Homo sapiens
MFVPESTSKLQKFTSWFMGRRPEYTDPKVVAQGEGREGKAPSPLLPPSPIQVTAWEWV

SEQ ID NO: 98786 - protein, 154 aa, Homo sapiens
MAAAGAFRLRRAASALLLRSPRLPARELSAPARLYHKKVVDHYENPRNVGSLDKTSKNVGTGLVGAPACGDVMKLQIQVDEKGKIVDARFKTFGCGSAIASSSLATEWVKGKTVEEALTIKNTDIAKELCLPPVKLHCSSKSLLSIPVSWDIWQ

SEQ ID NO: 98787 - protein, 161 aa, Homo sapiens
  MOD_RES (1)..(1): Any amino acid
XDYENPSNLAAGNKYTVIIQVTVNILEENDEKPICTPNSYFLALPVDLKVGTNIQNFKLTCTDLDSSPRSFRYSIGPGNVNNHFTFSPNAGSNVTRLLLTSRFDYAGGFDKIWDYKLLVYVTDDNLMSDRKKAEALVETGTVTLSIKVIPHPTTIITTTPR

SEQ ID NO: 98788 - protein, 703 aa, Homo sapiens
MPPATGGGLAESELRPRRGRCGPQAARAAGRDVAAEAVARSPKRPAWGSRRFEAVGWWALLALVTLLSFATRFHRLDEPPHICWDETHFGKMGSYYINRTFFFDVHPPLGKMLIGLAGYLSGYDGTFLFQKPGDKYEHHSYMGMRGFCAFLGSWLVPFAYLTVLDLSKSLSAALLTAALLTFDTGCLTLSQYILLDPILMFFIMAAMLSMVKYNSCADRPFSAPWWFWLSLTGVSLAGALGVKFVGLFIILQVGLNTIADLWYLFGDLSLSLVTVGKHLTARVLCLIVLPLALYTATFAVHFMVLSKSGPGDGFFSSAFQARLSGNNLHNASIPEHLAYGSVITVKNLRMAIGYLHSHRHLYPEGIGARQQQVTTYLHKDYNNLWIIKKHNTNSDPLDPSFPVEFVRHGDIIRLEHKETSRNLHSHYHEAPMTRKHYQVTGYGINGTGDSNDFWRIEVVNRKFGNRIKVLRSRIRFIHLVTGCVLGSSGKVLPKWGWEQLEVTCTPYLKETLNSIWNVEDHINPKLPNISLDVLQPSFPEILLESHMVMIRGNSGLKPKDNEFTSKPWHWPINYQGLRFSGVNDTDFRVYLLGNPVVWWLNLLSIALYLLSGSIIAVAMQRGARLPAEVAGILWDTLLRLCAWGLASWPLARGIHVAGILSLLLGTAYSFYLFHPLAYGMVGPLAQDPQSPMAGLRWLDSWDF

SEQ ID NO: 98789 - protein, 111 aa, Homo sapiens
MEQPRKAVVVTGFGPFGEHTVNASWIAVQELEKLGLGDSVDLHVYEIPVEYQTVQRLIPALWEKHSPQISLRLYLLHLFVPESRSISLRPRAPTGEAVQRGPAGQGTESHH

SEQ ID NO: 98790 - protein, 64 aa, Homo sapiens
MAQLGKLLKEQKYDRQLRRFLHTFDSCLGPYGAYSGVERWMLSKQKQMKPGTVACACSPSNSRG

SEQ ID NO: 98791 - protein, 97 aa, Homo sapiens
AAAQQRSHPAMSPGTPGPTMGRSQGSPMDPMVMKRPQLYGMGSNPHSQPQQSSPYPGGSYGPPGPQRYPIGIQGRTPGAMAGMQYPQQQDLLSSFQF

SEQ ID NO: 98792 - protein, 1367 aa, Homo sapiens
MKSCAVSLTTAAVAFGDEAKKMAEGKASRESEEESVSLTVEEREALGGMDSRLFGFVRLHEDGARTKTLLGKAVRCYESLILKAEGKVESDFFCQLGHFNLLLEDYSKALSAYQRYYSLQADYWKNAAFLYGLGLVYFYYNAFHWAIKAFQDVLYVDPSFCRAKEIHLRLGLMFKVNTDYKSSLKHFQLALIDCNPCTLSNAEIQFHIAHLYETQRKYHSAKEAYEQLLQTENLPAQVKATVLQQLGWMHHNMDLVGDKATKESYAIQYLQKSLEADPNSGQSWYFLGRCYSSIGKVQDAFISYRQSIDKSEASADTWCSIGVLYQQQNQPMDALQAYICAVQLDHGHAAAWMDLGTLYESCNQPQDAIKCYLNAARSKRCSNTSTLAARIKFLQAQLCNLPQSSLQNKTKLLPSIEEAWSLPIPAELTSRQGAMNTAQQNGSDNWNGGQSLSHHPVQQVYSLCLTPQKLQHLEQLRANRDNLNPAQKHQLEQLESQFVLMQQMRHKEVAQVRTTGIHNGAITDSSLPTNSVSNRQPHGALTRVSSVSQPGVRPACVEKLLSSGAFSAGCIPCGTSKILGSTDTILLGSNCIAGSESNGNVPYLQQNTHTLPHNHTDLNSSTEEPWRKQLSNSAQGLHKSQSSCLSGPNEEQPLFSTGSAQYHQATSTGIKKANEHLTLPSNSVPQGDADSHLSCHTATSGGQQGIMFTKESKPSKNRSLVPETSRHTGDTSNGCADVKGLSNHVHQLIADAVSSPNHGDSPNLLIADNPQLSALLIGKANGNVGTGTCDKVNNIHPAVHTKTDHSVASSPSSAISTATPSPKSTEQRSINSVTSLNSPHSGLHTVNGEGLGKSQSSTKVDLPLASHRSTSQILPSMSVSICPSSTEVLKACRNPGKNGLSNSCILLDKCPPPRPPTSPYPPLPKDKLNPPTPSIYLENKRDAFFPPLHQFCTNPKNPVTVIRGLAGALKLDLGLFSTKTLVEANNEHMVEVRTQLLQPADENWDPTGTKKIWRCESNRSHTTIAKYAQYQASSFQESLREENEKRTQHKDHSDNESTSSEKWKLQLHELTKLPAFARVVSAGNLLTHVGHTILGMNTVQLYMKVPGSRTPGHQENNNFCSVNINIGPGDCEWFVVPEDYWGVLNDFCEKNNLNFLMSSWWPNLEDLYEANVPVYRFIQRPGDLVWINAGTVHWVQAVGWCNNIAWNVGPLTACQYKLAVERYEWNKLKSVKSPVPMVHLSWNMARNIKVSDPKLFEMIKYCLLKILKQYQTLREALVAAGKEVIWHGRTNDEPAHYCSICEVEVFNLLFVTNESNTQKTYIVHCHDCARKTSKSLENFVVLEQYKMEDLIQVYDQFTLALSLSSSS

SEQ ID NO: 98793 - protein, 126 aa, Homo sapiens
MLLSLKPSEAPELDEDEGFGDWSQRPEQRQQHEGAQGALDSGEPPQCRSPEGEQEDRPGLHAYEKEDSDEVHLEELSLSKEGPGPEDTVQDNLGAAGAEEEQEEHQKCQQPRTPSPLVLEGTIEQS

SEQ ID NO: 98794 - protein, 99 aa, Homo sapiens
MASEQDVRARLQRAGQEHLLRFWAELAPEPRAALLAELALLEPEALREHCRRAAEACARPHGPPPDLAARLRPLPPERVGRASRSDPETRRRWEEEGTS

SEQ ID NO: 98795 - protein, 53 aa, Homo sapiens
MPLTPTVQGFQWTLRGPDVETSPFGAPRAASHGVGRHQELRDPTGGKGSETAT

SEQ ID NO: 98796 - protein, 146 aa, Homo sapiens
MANVPWAEVCEKFQAALALSRVELHKNPEKEPYKSKYSARALLEEVKALLGPAPEDEDERPEAEDGPGAGDHALGLPAEVVEPEGPVAQRAVRLAVIEFHLGVNHIDTEELSAGEEHLVKCLRLLRRITWVSCGLKEKKLKLHRLT

SEQ ID NO: 98797 - protein, 274 aa, Homo sapiens
  MOD_RES (1)..(1): Any amino acid
XISSDGQFALSGSWDGTLRLWDLTTGTTTRRFVGHTKDVLSVAFSSDNRQIVSGSRDKTIKLWNTLGVCKYTVQDESHSEWVSCVRFSPNSSNPIIVSCGWDKLVKVWNLANCKLKTNHIGHTGYLNTVTVSPDGSLCASGGKDGQAMLWDLNEGKHLYTLDGGDIINALCFSPNRYWLCAATGPSIKIWDLEGKIIVDELKQEVISTSSKAEPPQCTSLAWSADGQEYITTTYKLAVEMRAVSYSLPGVVAHAYWRLRLCLLATRTTWCECGR

SEQ ID NO: 98798 - protein, 114 aa, Homo sapiens
MVDKDTERDIEMKRQLRRLRELHLYSTWKKYQEAMKTSLGVPQRGDLEDLEEHVPGQTVSEEATGVHMMQVDPATLAKQLEDSTITGSHQQMSASPSSAPAEEATEKTKVEEEV

SEQ ID NO: 98799 - protein, 2220 aa, Homo sapiens
  MOD_RES (1)..(1): Any amino acid
XGRRDVPGTLMEPGRGAGPAGMAEPRAKAARPGPQRFLRRSVVESDQEEPPGLEAAEAPGPQPPQPLQRRVLLLCKTRRLIAERARGRPAAPAPAALVAQPGAPGAPADAGPEPVGTQEPGPDPIAAAVETAPAPDGGPREEAAATVRKEDEGAAEAKPEPGRTRRDEPEEEEDDEDDLKAVATSLDGRFLKFDIELGRGSFKTVYKGLDTETWVEVAWCELQDRKLTKLERQRFKEEAEMLKGLQHPNIVRFYDFWESSAKGKRCIVLVTELMTSGTLKTYLKRFKVMKPKVLRSWCRQILKGLLFLHTRTPPIIHRDLKCDNIFITGPTGSVKIGDLGLATLKRASFAKSVIGTPEFMAPEMYEEHYDESVDVYAFGMCMLEMATSEYPYSECQNAAQIYRKVTCGIKPASFEKVHDPEIKEIIGECICKNKEERYEIKDLLSHAFFAEDTGVRVELAEEDHGRKSTIALRLWVEDPKKLKGKPKDNGAIEFTFDLEKETPDEVAQEMIESGFFHESDVKIVAKSIRDRVALIQWRRERIWPALQPKEQQDVGSPDKARGPPVPLQVQVTYHAQAGQPGPPEPEEPEADQHLLPPTLPTSATSLASDSTFDSGQGSTVYSDSQSSQQSVMLGSLADAAPSPAQCVCSPPVSEGPVLPQSLPSLGAYQQPTAAPGLPVGSVPAPACPPSLQQHFPDPAMSFAPVLPPPSTPMPTGPGQPAPPGQQPPPLAQPTPLPQVLAPQPVVPLQPVPPHLPPYLAPASQVGAPAQLKPLQMPQAPLQPLAQVPPQMPPIPVVPPITPLAGIDGLPPALPDLPTATVPPVPPPQYFSPAVILPSLAAPLPPASPALPLQAVKLPHPPGAPLAMPCRTIVPNAPATIPLLAVAPPGVAALSIHSAVAQLPGQPVYPAAFPQMAPTDVPPSPHHTVQNMRATPPQPALPPQPTLPPQPVLPPQPTLPPQPVLPPQPTRPPQPVLPPQPMLPPQPVLPPQPALPVRPEPLQPHLPEQAAPAATPGSQILLGHPAPYAVDVAAQVPTVPVPPAAVLSPPLPEVLLPAAPELLPQFPSSLATVSASVQSVPTQTATLLPPANPPLPGGPGIASPCPTVQLTVEPVQEEQASQDKPPGLPQSCESYGGSDVTSGKELSDSCEGAFGGGRLEGRAARKHHRRSTRARSRQERASRPRLTILNVCNTGDKMVECQLETHNHKMVTFKFDLDGDAPDEIATYMVEHDFILQAERETFIEQMKDVMDKAEDMLSEDTDADRGSDPGTSPPHLSTCGLGTGEESRQSQANAPVYQQNVLHTGKRWFIICPVAEHPAPEAPESSPPLPLSSLPPEASQDSAPYKDQLSSKEQPSFLASQQLLSQAGPSNPPGAPPAPLAPSSPPVTALPQDGAAPATSTMPEPASGTASQAGGPGTPQGLTSELETSQPLAETHEAPLAVQPLVVGLAPCTPAPEAASTRDASAPREPLPPPAPEPSPHSGTPQPALGQPAPLLPAAVGAVSLATSQLPSPPLGPTVPPQPPSALESDGEGPPPRVGFVDSTIKSLDEKLRTLLYQEHVPTSSASAGTPVEVGDRDFTLEPLRGDQPRSEVCGGDLALPPVPKEAVSGRVQLPQPLVEKSELAPTRGAVMEQGTSSSMTAESSPRSMLGYDRDGRQVASDSHVVPSVPQDVPAFVRPARVEPTDRDGGEAGESSAEPPPSDMGTVGGQASHPQTLGARALGSPRKRPEQQDVSSPAKTVGRFSVVSTQDEWTLASPHSLRYSAPPDVYLDEAPSSPDVKLAVRRAQTASSIEVGVGEPVSSDSGDEGPRARPPVQKQASLPVSGSVAGDFVKKATAFLQRPSRAGSLGPETPSRVGMKVPTISVTSFHSQSSYISSDNDSELEDADIKKELQSLREKHLKEISELQSQQKQEIEALYRRLGKPLPPNVGFFHTAPPTGRRRKTSKSKLKAGKLLNPLVRQLKVVASSTGHLADSSRGPPAKDPAQASVGLTADSTGLSGKAVQTQQPCSVRASLSSDICSGLASDGGGARGQGWTVYHPTSERVTYKSSSKPRARFLSGPVSVSIWSALKRLCLGKEHSSRSSTSSLAPGPEPGPQPALHVQAQVNNSNNKKGTFTDDLHKLVDEWTSKTVGAAQLKPTLNQLKQTQKLQDMEAQAGWAAPGEARAMTAPRAGVGMPRLPPAPGPLSTTVIPGAAPTLSVPTPGSCGPRAVSTPTSYT

SEQ ID NO: 98800 - protein, 257 aa, Homo sapiens
MATVWDEAEQDGIGEEVLKMSTEEIIQRTRLLDSEIKIMKSEVLRVTHELQAMKDKIKENSEKIKVNKTLPYLVSNVIELLDVDPNDQEEDGANIDLDSQRKGKCAVIKTSTRQGVNKDSYLILETLPTEYDSRVKAMEVDERPTEQYSDIGGLDKQIQELVEAIVLPMNHKEKFENLGIQPPKGVLMYGPPGTGKTLLARACAAQTKATFLKLAGPQLVQMFIGDGAKLVRDAFALAKEKAPSIIFIDELDAIGTK

SEQ ID NO: 98801 - protein, 43 aa, Homo sapiens
MRTRPRPRLRVSLLLPRLECNGMISAHWHLHLLSSSDSPPSAS

SEQ ID NO: 98802 - protein, 79 aa, Homo sapiens
MDESALLDLLECPVCLERLDASAKVLPCQHTFCKRCLLGIVGSRNELRCPECRTLVGSGVEELPSNILLVRLLDGIKQR

SEQ ID NO: 98803 - protein, 72 aa, Homo sapiens
  MOD_RES (1)..(1): Any amino acid
XVCLPLPCRCSGETTPTPGPVPSAECSRRPVQMESSPSTWESGTLWTTSTSWTLWMVWSWWILSISKSGESM

SEQ ID NO: 98804 - protein, 1012 aa, Homo sapiens
MRGAWVHLHSGAASSLRPCRCGAGAAPKSSPRSPGGRRGDGSSDSEGGVSFAGVLFLQFGEETRRVHITHEVSSLDTLHALIAHMFPQKLTMGMLKSPNTAILIKDEARNVFYELEDVRDIQDRSIIKIYRKEPLYAAFPGSHLTNGDLRREMVYASRESSPTRRLNNLSPAPHLASGSPPPGLPSGLPSGLQSGSPSRSRLSYAGGRPPSYAGSPVHHAAERLGGAPAAQGVSPSPSAILERRDVKPDEDLASKAGGMVLVKGEGLYADPYGLLHEGRLSLAAAAGDPFAYPGAGGLYKRGSVRSLSTYSAAALQSDLEDSLYKAAGGGGPLYGDGYGFRLPPSSPQKLADVAAPPGGPPPPHSPYSGPPSRGSPVRQSFRKDSGSSSVFAESPGGKTRSAGSASTAGAPPSELFPGPGERSLVGFGPPVPAKDTETRERMEAMEKQIASLTGLVQSALLRGSEPETPSEKIEGSNGAATPSAPCGSGGRSSGATPVSGPPPPSASSTPAGQPTAVSRLQMQLHLRGLQNSASDLRGQLQQLRKLQLQNQESVRALLKRTEAELSMRVSEAARRQEDPLQRQRTLVEEERLRYLNDEELITQQLNDLEKSVEKIQRDVSHNHRLVPGPELEEKALVLKQLGETLTELKAHFPGLQSKMRVVLRVEVEAVKFLKEEPQRLDGLLKRCRGVTDTLAQIRRQVDEGVWPPPNNLLSQSPKKVTAETDFNKSVDFEMPPPSPPLNLHELSGPAEGASLTPKGGNPTKGLDTPGKRSVDKAVSVEAAERDWEEKRAALTQYSAKDINRLLEETQAELLKAIPDLDCASKAHPGPAPTPDHKPPKAPHGQKAAPRTEPSGRRGSDELTVPRYRTEKPSKSPPPPPPRRSFPSSHGLTTTRTGEVVVTSKKDSAFIKKAESEELEVQKPQVKLRRAVSEVARPASTPPIMASAIKDEDDEDRIIAELESGGGSVPPMKVVTPGASRLKAAQGQAGSPDKSKHGKQRAEYMRIQAQQQV

SEQ ID NO: 98805 - protein, 510 aa, Homo sapiens
MPTVEELYRNYGILADATEQVGQHKDAYQVILDGVKGGTKEKRLAAQFIPKFFKHFPELADSAINAQLDLCEDEDVSIRRQAIKELPQFATGENLPRVADILTQLLQTDDSAEFNLVNNALLSIFKMDAKGTLGGLFSQILQGEDIVRERAIKFLSTKLKTLPDEVLTKEVEELILTESKKVLEDVTGEEFVLFMKILSGLKSLQTVSGRQQLVELVAEQADLEQTFNPSDPDCVDRLLQCTRQAVPLFSKNVHSTRFVTYFCEQVLPNLGTLTTPVEGLDIQLEVLKLLAEMSSFCGDMEKLETNLRKLFDKLLEYMPLPPEEAENGENAGNEEPKLQFSYVECLLYSFHQLGRKLPDFLTAKLNAEKLKDFKIRLQYFARGLQVYIRQLRLALQGKTGEALKTEENKIKVVALKITNNINVLIKDLFHIPPSYKSTVTLSWKPVQKVEIGQKRASEDTTSGSPPKKSSAGPKRDARQIYNPPSGKYSSNLGNFNYGERFRLGTRNMRD

SEQ ID NO: 98806 - protein, 399 aa, Homo sapiens
MLTFMASDSEEEVCDERTSLMSAESPTPRSCQEGRQGPEDGENTAQWRSQENEEDGEEDPDRYVCSGVPGRPPGLEEELTLKYGAKHVIMLFVPVTLCMIVVVATIKSVRFYTEKNGQLIYTPFTEDTPSVGQRLLNSVLNTLIMISVIVVMTIFLVVLYKYRCYKFIHGWLIMSSLMLLFLFTYIYLGEVLKTYNVAMDYPTLLLTVWNFGAVGMVCIHWKGPLVLQQAYLIMISALMALVFIKYLPEWSAWVILGAISVYDLVAVLCPKGPLRMLVETAQERNEPIFPALIYSSAMVWTVGMAKLDPSSQGALQLPYDPEMEDSYDSFGEPSYPEVFEPPLTGYPGEELEEEEERGVKLGLGDFIFYSVLVGKAAATGSGDWNTTLACFVAILIICL

SEQ ID NO: 98807 - protein, 193 aa, Homo sapiens
MEGCVSNLMVCNLAYSGKLEELKESILADKSLATRTDQAGWSPLHIAASAGRDEIVKALLGKGAQVNAVNQNGCTPLHYAASKNRHEIAVMLLEGGANPDAKDHYEATAMHRAAAKGNLKMIHILLYYKASTNIQDTEGNTPLHLACDEERVEEAKLLVSQGASIYIENKEEKTPLQVAKGGLGLILKRMVEG

SEQ ID NO: 98808 - protein, 62 aa, Homo sapiens
GCSLRHFACEQNLLSRPDGSASFLQGDTSVLAGVYGPAEVKVSKEIFNKATLEVILSPALPL

SEQ ID NO: 98809 - protein, 44 aa, Homo sapiens
  MOD_RES (1)..(1): Any amino acid
XAPREADIVGCTVCPASGEESTRKQTPLTPDRTCWSLASATRNA

SEQ ID NO: 98810 - protein, 223 aa, Homo sapiens
MLVSLKMSYKAAAGEDYKADCPPGNPAPTSNHGPDATEAEEDFVDPWTVQTSSAKGIDYDKLIVRFGSSKIDKELINRIERATGQRPHHFLRRGIFFSHRDMNQVLDAYENKKPFYLYTGRGPSSEAMHVGHLIPFIFTKWLQDVFNVPLVIQMTDDEKYLWKDLTLDQAYSYAVENAKDIIACGFDINKTFIFSDLDYMGMSSGFYKNVVKIQKHVTFNQVK

SEQ ID NO: 98811 - protein, 554 aa, Homo sapiens
MPKNSKVVKRELDDDVTESVKDLLSNEDAADDAFKTSELIVDGQEEKDTDVEEGSEVEDERPAWNSKLQYILAQVGFSVGLGNVWRFPYLCQKNGGGAYLLPYLILLMVIGIPLFFLELSVGQRIRRGSIGVWNYISPKLGGIGFASCVVCYFVALYYNVIIGWSLFYFSQSFQQPLPWDQCPLVKNASHTFVEPECEQSSATTYYWYREALNISSSISESGGLNWKMTICLLAAWVMVCLAMIKGIQSSGKIIYFSSLFPYVVLICFLIRAFLLNGSIDGIRHMFTPKLEIMLEPKVWREAATQVFFALGLGFGGVIAFSSYNKRDNNCHFDAVLVSFINFFTSVLATLVVFAVLGFKANVINEKCITQNSETIMKFLKMGNISQDIIPHHINLSTVTAEDYHLVYDIIQKVKEEEFPALHLNSCKIEEELNKAVQGTGLAFIAFTEAMTHFPASPFWSVMFFLMLVNLGLGSMFGTIEGIVTPIVDTFKVRKEILTAAITTLLLSSLLTSAEMWLRNGMQSSFTFGGFSANEHKRTESNKNMGILYEFQKLF

SEQ ID NO: 98812 - protein, 69 aa, Homo sapiens
QPNIAKKYIDQKFVLQLLELFDSEDPRERDFLKTTLHRIYGKFLGLRAYIRKQINNIFYRCLKFSKIKY

SEQ ID NO: 98813 - protein, 59 aa, Homo sapiens
MGKEKTHINIVVIGHVDSGKSTTTGHLIYKCGGIDKRTIEKFEKEAAEGLLGPGSRPQP

SEQ ID NO: 98814 - protein, 495 aa, Homo sapiens
MIHVRRHETRRNSKSHVPEQKSRVDWRRTKRSSISQLLDSDEELDSEEFDSDEELDSDESFENDEELDSNKGPDCNKTPGSERELNLSKIQSEGNDSKCLINSGNGSTYEEETNKIKHRNIDLQDQEKHLSQEDNDLNKQTGQIIEDDQEKHLSQEDNDLNKQTGQIIEDDLEEEDIKRGKRKRLSSVMCDSDESDDSDILVRKVGVKRPRRVVEDEGSSVEMEQKTPEKTLAAQKREKLQKLKELSKQRSRQRRSSGRDFEDSEKESCPSSDEVDEEEEEDNYESDEDGDDYIIDDFVVQDEEGDEENKNQQGEKLTTSQLKLVKQNSLYSFSDHYTHFERVVKALLINALDESFLGTLYDGTRQKSYAKDMLTSLHYLDNRFVQPRLESLVSRSRWKEQYKERVENYSNVFTVGRICASRTRIYHKLKHFKFKLYQECCTIAMTEEVEDEQVKETVERIFRRSKENGWIKEKYGQLEEYLNFADYFQEEKFEL

SEQ ID NO: 98815 - protein, 204 aa, Homo sapiens
MWGLIAQGVKCAVLEARKSKIKLAAGSVSDCGLNVHKQCSKMVPNDCKPDLKHVKKVYSCDLTTLVKAHTTKRPMVVDMCIREIESRGLNSEGLYRVSGFSDLIEDVKMAFDRDGEKADISVNMYEDINIITGALKLYFRDLPIPLITYDAYPKFIESAKIMDPDEQLETLHEALKLLPPAHCETLRYLMAHLKRVTLHEKENL

SEQ ID NO: 98816 - protein, 7 aa, Homo sapiens
MENPSPA

SEQ ID NO: 98817 - protein, 162 aa, Homo sapiens
  MOD_RES (1)..(1): Any amino acid
XTFLGRDGNPNKRNVHNETSMHLLCMGPQIMISEGALHPRLARPTEDDFRRADCLQMILKWKGAKLDQGEYERAAIDAVDNKKNTPLHYAAASGMKACVELLVKHGGDLFAENENKDTPCDCAEKQHHKDLALNLESQMVFSRDPEAEEIEAEYAALDKREY

SEQ ID NO: 98818 - protein, 622 aa, Homo sapiens
MSLAAYCVICCRRIGTSTSPPKSGTHWRDIRNIIKFTGSLILGGSLFLTYEVLALKKAVTLDTQVVEREKMKSYIYVHTVSLDKGENHGIAWQARKELHKAVRKVLATSAKILRNPFADPFSTVDIEDHECAVWLLLRKSKSDDKTTRLEAVREMSETHHWHDYQYRIIAQACDPKTLIGLARSEESDLRFFLLPPPLPSLKEDSSTEEELRQLLASLPQTELDECIQYFTSLALSESSQSLAAQKGGLWCFGGNGLPYAESFGEVPSATVEMFCLEAIVKHSEISTHCDKIEANGGLQLLQRLYRLHKDCPKVQRNIMRVIGNMALNEHLHSSIVRSGWVSIMAEAMKSPHIMESSHAARILANLDRETVQEKYQDGVYVLHPQYRTSQPIKADVLFIHGLMGAAFKTWRQQDSEQAVIEKPMEDEDRYTTCWPKTWLAKDCPALRIISVEYDTSLSDWRARCPMERKSIAFRSNELLRKLRAAGVGDRPVVWISHSMGGLLVKKMLLEASTKPEMSTVINNTRGIIFYSVPHHGSRLAEYSVNIRYLLFPSLEVKELSKDSPALKTLQDDFLEFAKDKNFQVLNFVETLPTYIGSMIKLHVVPVESAGIHSFETCWLLDA

SEQ ID NO: 98819 - protein, 154 aa, Homo sapiens
MPKVKSGAIGRRRGRQEQRRELKSAGGLMFNTGIGQHILKNPLIINSIIDKAALRPTDVVLEVGPGTGNMTVKLLEKAKKVVACELDPRLVAELHKRVQGTPVASKLQVLVGDVLKTDLPFFDTCVANLPYQISSPFVFKLLLHRPFFRFVTKD

SEQ ID NO: 98820 - protein, 179 aa, Homo sapiens
ERGASIAHCPNSNLSLSSGFLNVLEVLKHEVKIGLGTDVAGGYSYSMLDAIRRAVMVSNILLINKVNEKSLTLKEVFRLATLGGSQALGLDGEIGNFEVGKEFDAILINPKASDSPIDLFYGDFFGDISEAVIQKFLYLGDDRNIEEVYVGGKQVVPFSSSVKETIHLPASSPHPPPFP

SEQ ID NO: 98821 - protein, 393 aa, Homo sapiens
MTAEDSTAAMSSDSAAGSSAKVPEGVAGAPNEAALLALMERTGYSMVQENGQRKYGGPPPGWEGPHPQRGCEVFVGKIPRDVYEDELVPVFEAVGRIYELRLMMDFDGKNRGYAFVMYCHKHEAKRAVRELNNYEIRPGRLLGVCCSVDNCRLFIGGIPKMKKREEILEEIAKVTEGVLDVIVYASAADKMKNRGFAFVEYESHRAAAMARRKLMPGRIQLWGHQIAVDWAEPEIDVDEDVMETVKILYVRNLMIETTEDTIKKSFGQFNPGCVERVKKIRDYAFVHFTSREDAVHAMNNLNGTELEGSCLEVTLAKPVDKEQYSRYQKAARGGGAAEAAQQPSYVYSCDPYTLAYYGYPYNALIGPNRDYFVKDTILETHPASLPLVLRRHA

SEQ ID NO: 98822 - protein, 155 aa, Homo sapiens
MASPDFQARKGKRVHQETLAPGETKDKMELLGLRGPLDLLGPGALLATLGKMAPGEHKAQRAPKESPDKTARWAQRDPQGPRVSLEYLERRATMGHQASLDHQGPRASQGAWGLGERTVWTVPQDRRGSLATEARMELQGPGVPQASRASRETQW

SEQ ID NO: 98823 - protein, 294 aa, Homo sapiens
MWRVCARRAQNVAPWAGLEARWTALQEVPGTPRVTSRSGPAPARRNSVTTGYGGVRALCGWTPSSGATPRNRLLLQLLGSPGRRYYSLPPHQKVPLPSLSPTMQAGTIARWEKKEGDKINEGDLIAEVETDKATVGFESLEECYMAKILVAEGTRDVPIGAIICITVGKPEDIEAFKNYTLDSSAAPTPQAAPAPTPAATASPPTPSAQAPGSSYPPHMQVLLPALSPTMTMGTVQRWEKKVGEKLSEGDLLAEIETDKATIGGRCSSNSPAFSSYTFSTLPSYSCWTKGKGVC

SEQ ID NO: 98824 - protein, 189 aa, Homo sapiens
MLLGLLSLWKGLTLSPRLECSGTILAHRNLGFPGSSDSPASASRMQGEAHPSASLIDRTIKMRKETEARKVVLAWGLLNVSMAGMIYTEMTGKLISSYYNVTYWPLWYIELALASLFSLNALFDFWRYFKYTVAPTSLVVSPGQQTLLGLKTAVVQTTPPHDLAATQIPPAPPSPSIQGQSVLSYSPSR

SEQ ID NO: 98825 - protein, 5314 aa, Homo sapiens
SLPPSACGPRVMETAPPDEMTTSFPSSVTNTLMMTSKTITMTTSTDSTLGNTEETSTAGTESSTPVTSAVSITAGQEGQSRTTSWRTSIQDTSASSQNHWTRSTQTTRESQTSTLTHRTTSTPSFSPSVHNVTGTVSQKTSPSGETATSSLCSVTNTSMMTSEKITVTTSTGSTLGNPGETSSVPVTGSLMPVTSAALVTVDPEGQSPVTFSRTSTQDTTAFSKNHQTQSVETTRVSQINTLNTLTPVTTSTVLSSPSGFNPSGTVSQETFPSGETTISSPSSVSNTFLVTSKVFRMPISRDSTLGNTEETSLSVSGTISAITSKVSTIWWSDTLSTALSPSSLPPKISTAFHTQQSEGAETTGRPHERSSFSPGVSQEIFTLHETTTWPSSFSSKGHTTWSQTELPSTSTGAATRLVTGNPSTGAAGTIPRVPSKVSAIGEPGEPTTYSSHSTTLPKTTGAGAQTQWTQETGTTGEALLSSPSYSVTQMIKTATSPSSSPMLDRHTSQQITTAPSTNHSTIHSTSTSPQESPAVSQRGHTQAPQTTQESQTTRSVSPMTDTKTVTTPGSSFTASGHSPSEIVPQDAPTISAATTFAPAPTGDGHTTQAPTTALQAAPSSHDATLGPSGGTSLSKTGALTLANSVVSTPGGPEGQWTSASASTSPDTAAAMTHTHQAESTEASGQTQTSEPASSGSRTTSAGTATPSSSGASGTTPSGSEGISTSGETTRFSSNPSRDSHTTQSTTELLSASASHGAIPVSTGMASSIVPGTFHPTLSEASTAGRPTGQSSPTSPSASPQETAAISRMAQTQRTRTSRGSDTISLASQATDTFSTVPPTPPSITSSGLTSPQTQTHTLSPSGSGKTFTTALISNATPLPVTYASSASTGHTTPLHVTDASSVSTGHATPLPVTSPSSVSTGHTTPLPVTDTSSESTGHVTPLPVTSLSSASTGDSTPLPVTDTSSASTGHVTPLPVTSLSSASTGDTTPLPVTDTSSASTGHATSLPVTDTSSVSTGHTTPLPVTDTSSASTGHATSLPVTDTSSVSTGDTTPLHVTDASSASTGQDTPLPVTSLSSVSTGDTTPLPVTSPSSASTGHATPLLVTDASSVSTGHATSLLVTDASSVSTGHATALHVTSPSSASTGDTTPLPVTDTSSASTGHATSLPVTDTSSASTGHATPLPVTDTSSASTGQATPLPVTGPSSASTGHATSLPVTSLSSVSTGDTTPLPVTSPSSASSGHTTPLPVTDASSVSTGHTTPLPVTDASSASTGHATPLPVTSTSSASTGDTTPLPVTSPSSASTGHATSLPVTDTSSVSTGHATSLPVTDASSVFTGHATSLPVTIPSSASSGHTTPLPVTDASSVSTGHATSLPVTDASSVSTGDTTPLPVTDTSSASTGHATPLHVTSPSSASTGHATPLPVTSLSSVSTGDTTPLPVTSPSSASTGHTTPLPVTDTSSASTGQATALPVTSTSSASTGDTTPLPVTDTSSASTGDTTPLPVTSPSSASTGHATPLPVTDTSSAYTGDTTSLPVTDTSSSSTGHATPLHVTSPSSASTGQATPLPVTNTSSASTGHATPLPVTGLSSASTGDTTRLPVTDISSASTGQATPLPVTNTSSVSTGDTMPLPVTSPSSASTGHATPLPVTDASSASTGHATPLPVTDTSSVSTGHATPLPLTSLSSVSTGDTTPLPVTDASSASTGHATPLPVTSLSSVSTGDTTPLPVTDASSASTGDTTPLPVTIPSSASSGHTTSLPVTDTSSVSTGDTTPLLVTDASSVSTGHATPLPVTDTSSASTGDTTRLPVTDTSSASTGQATPLPVTSLSSVSTGDTTPLLVTSTSSASTGHATSLPVTDTSSVSTGHATSLPVTDTSSVSTGHATPLPVTDASSVSTGHATPLPVTDTSSASTGQATPLPVTSLSSVSTGDTMPLPVTDASSASTGQATLLPVTSLSSVSTGDTTPLPVTSPSSASTGHATPLLVTDTSSASTGHATPLPVTDASSVSTGHATSLPVTDTSSVSTGDTTPLPVTSPSSASTGDTTPLPVTDASSVSTGHTTPLPVTDTSSASTGHATPLHVTSPSSASTGHATPLPVTSTSSASTGHATSLPVTSTSSASTGHATPLPVTDNSSVSTGHATPLPVTGLSSATTDDTTRLPVTDVSSASTGQATPLPVTSLSSVSTGDTTPLPVTSPSSASTGHASPLLVTDASSASTGQATPLPVTSPSSASTGDTTPLPVTDASSASTGHATSLLVTDASSVSTGDTTPLPVTDTNSASTGDTTPLHVTDASSVSTGDTTPLPVTDTSSASTGHATHLPVTGLSSASTGDTTRLPVTNVSSASTGHATPLPVTSTSSASTGDTTPLPGTDTSSVSTGHTTPLLVTDASSVSTGDTTRLPVTSPSSASTGHTTPLPVTDTSSASTGDTTPLPVTNASSLSTGHATPLHVTSPSSASTGHATPLPVTSTSSASTGHATPLPVTSTSSASTDDTTRLPVTDVSSASTGQATPLPVTSLSSVSTGDTTPLPVTSPSSASTGHASPLLVTDASSASTGQATPLPVTGLSSASTDDTTRLPVTSPSSASTGDTTPLPVTDASSASTGDTTSLPVTIPSSASSGHTTSLPVTDASSVSTGHATSLLVTDASSVSTGDTTPLPVTDTNSASTGDTTPLHVTDASSVSTGHATSLPVTSLSSASTGDTTPLPVTSPSSASSGHTTSLPVTDASSVSTGHATSLPVTIPSSASSGHTTPLPVTDASSVPTGHATSLPVTDASSVSTGHATPLPVTDASSVSTGHATPLPVTSLSSASSTGDTTPLPVTDTSSASTGQDTPLPVTSLFSVSTGDTTPLPVTDASSVSTGHATSLLVTDASSASTGDTTPLPVTDTSSVSTGHATSLPVTDTSSASTGHATSLPVTDTSSASTGQATPLPVTSPSSASTGHAIPLLVTDTSSASTGQATPLPVTSLSSASTGDTTPLPVTDASSVSTGHATSLPVTSLSSVSTGDTTPLPVTSPSSASTGHATPLHVTSPSSASTGHATPLPVTSLSSASTGDTTPLPVTSPSSASTGHATPLHVTDASSVSTGDTTPLPVTSPSSASSGHTTPLPVTDASSASTGHATPLPVTSTSSASTGDTTPLPVTSPSSASTGHTTPLPVTDTPSASTGDTTPLPVTDTSAASTGHATPLPVTSTSSASTGDTTPLPVTDTSSASTGHATPLPVTNTSSVSTGHATPLHVTSPSSASTGHTTPLPVTDASSVSTGHATSLPVTDASSVSTGHATPLPVTDASSVSTGHATPLPLTSLSSVSTGDTTPLPVTDTSSASTGQATPLPVTSLSSVSTGDTTPLPVTDTSSASTGHATSLPVTDTSSASTGHATPLPVTDTSSISTGHATPLHVTSPSSASTGHATPLPVTDTSSASTGHATPLPVTSLSSVSTGDTTPLPVTSPSSASTGHATPLLVTDASSASTGQATPLPVTSLSSVSTGDTTPLPVTSPSSASTGHATSLPVTDTSSASTGDTTSLPVTDTSSAYTGDTTSLPVTDTSSSSTGDTTPLLVTETSSASTGDTTPVPVTDTSSVSTGHATPLPVTGLSSASTGDTTRLPVTDISSASTGQATPLPVTNTSSVSTGDTMPLPVTSPSSASTGHATPLPVTSTSSASTGHATPVPVTSTSLASTGHTTPLPVTSPSSASTGHTTPLPVTDTSSASTGDTTPLPVTNASSLSTGHTTPLHVTIPSSASTGDTSTLPVTGASSASTGHATPLPVTDTSSVSTGHATPLPVTSFSSVSTGDTTPLPVTDASSASTGHATPLPVTDTSSASTGDTTPLPVTDASSASTGQATPLPVTSLSSVSTGDTTPLPVTIPSSASSGHTTSLPVSDTSSASTGQATPLPVTSLSSVSTGDTTPLLVTDASSVSTGHATPLPVTDTSSASTGDTTRLPVTDTSSASTGQATPLPVTSLSSVSTGDTTPLLVTNTSSVSTGHATSLPVTIPSSSSSGHTTPLPVTSTSSVSTGHVTPLHVTSPSSSSTGQATPLPVTSTSSVSTGHVTPLHVTSPSSASTGHATPLPVTSTSSASTGHATPLPVTDASSVSTGHATPLPVTDTSSASTGDTTPLPVTDTSSASTGQATPLPVTSLSSVSTGHATPLAVSSATSASTVSSDSPLKMETSGMTTPSLKTDGGRRTATSPPPTTSQTIISTIPSTAMHTRSTAAPIPILPERGVSLFPYGADAGDLEFVRRTVDFTSPLFKPATGFPLGSSLRDSLYFTDNGQIIFPESDYQIFSYPNPLPTGFTGRDPVALVAPFWDDADFSTGRGTTFYQEYETFYGEHSLLVQQAESWIRKMTNNGGYKARWALKVTWVNAHAYPAQWTLGSNTYQAILSTDGSRSYALFLYQSGGMQWDVAQRSGNPVLMGFSSGDGYFENSPLMSQPVWERYRPDRFLNSNSGLQGLQFYRLHREERPNYRLECLQWLKSQPRWPSWGWNQVSCPCSWQQGRRDLRFQPVSIGRWGLGSRQLCSFTSWRGGVCCSYGPWGEFREGWHVQRPWQLAQELEPQSWCCRWNDKPYLCALYQQRRPHVGCATYRPPQPAWMFGDPHITTLDGVSYTFNGLGDFLLVGAQDGNSSFLLQGRTAQTGSAQATNFIAFAAQYRSSSLGPVTVQWLLEPHDAIRVLLDNQTVTFQPDHEDGGGQETFNATGVLLSRNGSEVSASFDGWATVSVIALSNILHASASLPPEYQNRTEGLLGVWNNNPEDDFRMPNGSTIPPGSPEEMLFHFGMTWQINGTGLLGKRNDQLPSNFTPVFYSQLQKNSSWAEHLISNCDGDSSCIYDTLALRNASIGLHTREVSKNYEQANATLNQYPPSINGGRVIEAYKGQTTLIQYTSNAEDANFTLRDSCTDLELFENGTLLWTPKSLEPFTLEILARSAKIGLASALQPRTVVCHCNAESQCLYNQTSRVGNSSLEVAGCKCDGGTFGRYCEGSEDACEEPCFPSVHCVPGKGCEACPPNLTGDGRHCAALGSSFLCQNQSCPVNYCYNQGHCYISQTLGCQPMCTCPPAFTDSRCFLAGNNFSPTVNLELPLRVIQLLLSEEENASMAEVNASVAYRLGTLDMRAFLRNSQVERIDSAAPASGSPIQHWMVISEFQYRPRGPVIDFLNNQLLAAVVEAFLYHVPRRSEEPRNDVVFQPISGEDVRDVTALNVSTLKAYFRCDGYKGYDLVYSPQSGFTCVSPCSRGYCDHGGQCQHLPSGPRCSCVSFSIYTAWGEHCEHLSMKLDAFFGIFFGALGGLLLLGVGTFVVLRFWGCSGARFSYFLNSAEALP

SEQ ID NO: 98826 - protein, 169 aa, Homo sapiens
MDSLEEPQKKVFKARKTMRVSDRQQLEAVYKVKEELLKTDVKLLNGNHENGDLDPTSPLENMDYIKDKEEVNGIEEICFDPEGSKAEWKETPCILSVNVKNKQDDDLNCEPLSPHNITPEPVSKLPAEPVSGDPAPGDLDAGDPASGVLASGDSTSGDPTSSEPSSSDA

SEQ ID NO: 98827 - protein, 27 aa, Homo sapiens
LKFDDLDGTHALMRRGFTVLARMVSIS

SEQ ID NO: 98828 - protein, 488 aa, Homo sapiens
MVSKSDQLLIVVSILEGRHFPKRPKHMLVVEAKFDGEQLATDPVDHTDQPEFATELAWEIDRKALHQHRLQRTPIKLQCFALDPVTSAKETIGYIVLDLRTAQETKQAPKWYQLLSNKYTKFKSEIQISIALETDTKPPVDSFKAKGAPPRDGKVPAILAGLDPRDIVAVLNEEGGYHQIGPAEYCTDSFIMSVTIAFATQLEQLIPCTMKLPERQPEFFFYYSLLGNDVTNEPFNDLINPNFEPERASVRIRSSVEILRVYLALQSKLQIHLCCGDQSLGSTEIPLTGLLKKGSTEINQHPVTVEGAFTLDPPNRAKQKLAPIPVELAPTVGVSVALQREGIDSQSLIELKTQNEHEPEHSKKKVLTPIKEKTLTGPKSPTVSPVPSHNQSPPTKDDATESEVESLQYDKDTKPNPKASSSVPASLAQLVTTSNASEVASGQKIAVPATSHHFCFSIDLRSIHALEIGFPINCILRCDLILFQSIIF

SEQ ID NO: 98829 - protein, 165 aa, Homo sapiens
KKKTPLKTDTFRVKKSPKRSPLSDPPSQDPTPAATPETPPVISAVVHATDEEKLAVTNQKWTCMTVDLEADKQDYPQPSDLSTFVNETKFSSPTEGKQLCSQLDPHSASENPAPREPKARRETSQPELDYRNSYEIEYMEKIGSSLPQDDDAPKKQALYLMFDTS

SEQ ID NO: 98830 - protein, 246 aa, Homo sapiens
  MOD_RES (1)..(1): Any amino acid
XGSSLGLCLGKAPSSSQLFLFFAMGSDVQPGTEMEIVVEETISVRDCLKLMLKKSGLQGDAWHLRKMDWCYEAGEPLCEEDATLKELLICSGDTLLLIEGQLPPLGFLKVPIWWYQLQGPSGHWESHQDQTNCTSSWGRVWRATSSQGASGNEPAQVSLLYLGDIEISEDATLAELKSQAMTLPPFLEFGVPSPAHLRAWTVERKRPGRLLRTDRQPLREYKLGRRIEICLEPLQKGENLGCILTP

SEQ ID NO: 98831 - protein, 90 aa, Homo sapiens
IFDRDSLPPGDRDKLRIPPTTHQALFPPHDARPQPRAPSCHLGGPNTLKWDYTRQDGTSYQRQFQALPGPPALRCKRDHQGRALLCQGAR

SEQ ID NO: 98832 - protein, 401 aa, Homo sapiens
EKEKAEREVIVREFQEELVDHLKTFSISESPLEGTSHCHINLNETWTSKKKLFQVEIQPEEKHEEFRKLFELISLLNYTADQIRKKNRELEEEATGYKKCLEMTINMLNAFANEDFSCHGDLNTDQLKMDILFKKLKQKFNDLVAEKEAVSSECVNLAKDNEVLHQELLSMRNVQEKCEKLEKDKKMLEEEVLNLKTHMEKDMVELGKLQEYKSELDERAVQEIEKLEEIHLQKQAEYEKQLEQLNKDNTASLKKKELTLKDVECKFSKMKTAYEEVTTELEEFKEAFAGAVKANNSMSKKLMKSDKKIAVISTKLFTEKQRMKYFLSTLPTRPEPELPCVENLNSIELNRKYIPKTAIRIPTSNPQTSNNCKNFLTEMELDRVEQIITGTKKSMLPKCIN

SEQ ID NO: 98833 - protein, 43 aa, Homo sapiens
TLESCRSMIALMDVSFLPPLPDPLSSAHGGQGNIQGAQSGKGP

SEQ ID NO: 98834 - protein, 121 aa, Homo sapiens
MLSTSRSRFIRNTNESGEEVTTFFDYDYGAPCHKFDVKQIGAQLLPPLYSLVFIFGFVGNMLVVLILINCKKLKCLTDIYLLNLAISDLLFLITLPLWAHSAANEWVFGNAMCKLFTGLYH

SEQ ID NO: 98835 - protein, 444 aa, Homo sapiens
MANCQIAILYQRFQRVVFGISQLLCFSALISELTNQKEVAAWTYHYSTKAYSWNISRKYCQNRYTDLVAIQNKNEIDYLNKVLPYYSSYYWIGIRKNNKTWTWVGTKKALTNEAENWADNEPNNKRNNEDCVEIYIKSPSAPGKWNDEHCLKKKHALCYTASCQDMSCSKQGECLETIGNYTCSCYPGFYGPECEYVRECGELELPQHVLMNCSHPLGNFSFNSQCSFHCTDGYQVNGPSKLECLASGIWTNKPPQCLAAQCPPLKIPERGNMTCLHSAKAFQHQSSCSFSCEEGFALVGPEVVQCTASGVWTAPAPVCKALQCQDLPVPNEARVNCSHPFGAFRYQSVCSFTCNEGLLLVGASVLQCLATGNWNSVPPECQAIPCTPLLSPQNGTMTCVQPLGSSSYKSTCQFICDEGYSLSGPERLDCTRSGRWTDSPPMCE

SEQ ID NO: 98836 - protein, 18 aa, Homo sapiens
  MOD_RES (1)..(1): Any amino acid
XDGAEPGRVDTFWQWTSS

SEQ ID NO: 98837 - protein, 345 aa, Homo sapiens
MFCSEKKLREVERIVKANDREYNEKFQYADNRIHTSKYNILTFLPINLFEQFQRVANAYFLCLLILQLIPEISSLTWFTTIVPLVLVITMTAVKDATDDYFRHKSDNQVNNRQSEVLINSKLQNEKWMNVKVGDIIKLENNQFVAADLLLLSSSEPHGLCYVETAELDGETNLKVRHALSVTSELGADISRLAGFDGIVVCEVPNNKLDKFMGILSWKDSKHSLNNEKIILRGCILRNTSWCFGMVIFAGPDTKLMQNSGKTKFKRTSIDRLMNTLVLWIFGFLICLGIILAIGNSIWESQTGDQFRTFLFWNEGEKSSVFSGFLTFWSYIIILNTVVPISLYVR

SEQ ID NO: 98838 - protein, 227 aa, Homo sapiens
MVPVLLSLLLLLGPAVPQENQDGRYSLTYIYTGLSKHVEDVPAFQALGSLNDLQFFRYNSKDRKSQPMGLWRQVEGMEDWKQDSQLQKAREDIFMETLKDIVEYYNDSNGSHVLQGRFGCEIENNRSSGAFWKYYYDGKDYIEFNKEIPAWVPFDPAAQITKQKWEAEPVYVQRAKAYLEEECPATLRKYLKYSKNILDRQGTHCFLLPSTEPRIKDDLRLGAQATS

SEQ ID NO: 98839 - protein, 829 aa, Homo sapiens
  MOD_RES (1)..(1): Any amino acid
XCCKKHGLRGMRWKCRVCLDYDLCTQCYMHNKHELAHAFDRYETAHSRPVTLSPRQGLPRIPLRGIFQGAKVVRGPDWEWGSQDGGEGKPGRVVDIRGWDVETGRSVASVTWADGTTNVYRVGHKGKVDLKCVGEAAGGFYYKDHLPRLGKPAELQRRVSADSQPFQHGDKVKCLLDTDVLREMQEGHGGWNPRMAEFIGQTGTVHRITDRGDVRVQFNHETRWTFHPGALTKALGRVGKVVKVFGDGNLRVAVAGQRWTFSPSCLVAYRPEEDANLDVAERARENKSSLSVALDKLRAQKSDPEHPGRLVVEVALGNAARALDLLRRRPEQVDTKNQGRTALQVAAYLGQVELIRLLLQARAGVDLPDDEGNTALHYAALGNQPEATRVLLSAGCRADAINSTQSTALHVAVQRGFLEVVRALCERGCDVNLPDAHSDTPLHSAISAGTGASGIVEVLTEVPNIDVTATNSQGFTLLHHASLKGHALAVRKILARARQLVDAKKEDGFTALHLAALNNHREVAQILIREGRCDVNVRNRKLQSPLHLAVQQAHVGLVPLLVDAGCSVNAEDEEGDTALHVALQRHQLLPLVADGAGGDPGPLQLLSRLQASGLPGSAELTVGAAVACFLALEGADVSYTNHRGRSPLDLAAEGRVLKALQGCAQRFRERQAGGGAAPGPRQTLGTPNTVTNLHVGAAPGPEAAECLVCSELALLVLFSPCQHRTVCEECARRMKKCIRCQVVVSKKLRPDGSEVASAAPAPGPPRQLVEELQSRYRQMEERITCPICIDSHIRLVFQCGHGACAPCGSALSACPICRQPIRDRIQIFV

SEQ ID NO: 98840 - protein, 200 aa, Homo sapiens
MSSDSMDQPRNPCENEPLTPGYHGFPARDSQGNQEPTTTPDAMVQPFTTIPFPPPPQNGIPTEYGVPHTQDYAGQTGEHNLTLYGSTQAHGEQSSNSPSTQNGSLTQTEGGAQTDGQQSQTQSSENSESKSTPKRLHVSNIPFRFRDPDLRQMFGQFGKILDVEIIFNERGSKGFGFVTFENSADADRAREKLHGTVVEG

SEQ ID NO: 98841 - protein, 190 aa, Homo sapiens
MEPPMEPSGGEQEPGAVRFLDLPWEDVLLPHVLNRVPLRQLLRLQRVSRAFRSLVQLHLAGLRRFDAAQVGPQIPRAALARLLRDAEGLQELALAPCHEWLSDEDLVPVLARNPQLRSVALGGCGQLSRRALGALAEGCPRLQRLSLAHCDWVDGLALRGLADRCPALEELDLTACRQLKDEAIVYLAQR

SEQ ID NO: 98842 - protein, 1267 aa, Homo sapiens
MSGPLEGADGGGDPRPGESFCPGGVPSPGPPQHRPCPGPSLADDTDANSNGSSGNESNGHESRGASQRSSHSSSSGNGKDSALLETTESSKSTNSQSPSPPSSSIAYSLLSASSEQDNPSTSGCSSEQSARARTQKELMTALRELKLRLPPERRGKGRSGTLATLQYALACVKQVQANQEYYQQWSLEEGEPCSMDMSTYTLEELEHITSEYTLQNQAAVLLRCKRDVFRGTRFSELLAPQDVGVFYGSTAPSRLPTWGTGASAGSGLRDFTQEKSVFCRIRGGPDRDPGPRYQPFRLTPYVTKIRVSDGAPAQPCCLLIAERIHSGYEAPRIPPDKRIFTTRHTPSCLFQDVDERAAPLLGYLPQDLLGAPVLLFLHPEDRPLMLAIHKKILQLAGQPFDHSPIRFCARNGEYVTMDTSWAGFVHPWSRKVAFVLGRHKVRTAPLNEDVFTPPAPSPAPSLDTDIQELSEQIHRLLLQPVHSPSPTGLCGVGAVTSPGPLHSPGSSSDSNGGDAEGPGPPAPVTFQQICKDVHLVKHQGQQLFIESRARPQSRPRLPATGTFKAKALPCQSPDPELEAGSAPVQAPLALVPEEAERKEASSCSYQQINCLDSILRYLESCNLPSTTKRKCASSSSYTTSSASDDDRQRTGPVSVGTKKDPPSAALSGEGATPRKEPVVGGTLSPLALANKAESVVSVTSQCSFSSTIVHVGDKKPPESDIIMMEDLPGLAPGPAPSPAPSPTVAPDPAPDAYRPVGLTKAVLSLHTQKEEQAFLSRFRDLGRLRGLDSSSTAPSALGCHHGPAPPSRRHHCRSKAKRSRHHQNPRAEAPCYVSHPSPVPPSTPWPTPPATTPFPAVVQPYPLPVFSPRGGPQPLPPAPTSVPPAAFPAPLVTPMVALVLPNYLFPTPSSYPYGALQTPAEGPPTPASHSPSPSLPALAPSPPHRPDSPLFNSRCSSPLQLNLLQLEELPRAEGAAVAGGPGSSAGPPPPSAEAAEPEARLAEVTESSNQDALSGSSDLLELLLQEDSRSGTGSAASGSLGSGLGSGSGSGSHEGGSTSASITRSSQSSHTSKYFGSIDSSEAEAGAARGGAEPGDQVIKYVLQDPIWLLMANADQRVMMTYQVPSRDMTSVLKQDRERLRAMQKQQPRFSEDQRRELGAVHSWVRKGQLPRALDVMACVDCGSSTQDPGHPDDPLFSELDGLGLEPMEEGGGEQGSSGGGSGEGEGCEEAQGGAKASSSQDLAMEEEEEGRSSSSPALPTAGNCTS

SEQ ID NO: 98843 - protein, 10 aa, Homo sapiens
MSQNGYFEDS

SEQ ID NO: 98844 - protein, 307 aa, Homo sapiens
MSQQDAVAALSERLLVAAYKGQTENVVQLINKGARVAVTKHGRTPLHLAANKGHLPVVQILLKAGCDLDVQDDGDQTALHRATVVGNTEIIAALIHEGCALDRQDKDGNTALHEASWHGFSQSAKLLIKAGANVLAKNKAGNTALHLACQNSHSQSTRVLLLAGSRADLKNNAGDTCLHVAARYNHLSIIRLLLTAFCSVHEKNQAGDTALHVAAALNHKKVAKILLEAGADTTIVNNAGQTPLETARYHNNPEVALLLTKAPQVGFTALSMVLIMRDYKVVGTPGCNLLKPLQTNLNMECNQAVEV

SEQ ID NO: 98845 - protein, 99 aa, Homo sapiens
MSNRPNNNPGGSLRRSQRNTAGAQPQDDSIGGRSCSSSSAVIVPQPEDPDRANTSERQKTGQVPKKDNSRGVKRSASPDYNRTNSPSSAKKPKALQHTE

SEQ ID NO: 98846 - protein, 344 aa, Homo sapiens
MDLVLKRCLLHLAVIGALLAVGATKVPRNQDWLGVSRQLRTKAWNRQLYPEWTEAQRLDCWRGGQVSLKVSNDGPTLIGANASFSIALNFPGSQKVLPDGQVIWVNNTIINGSQVWGGQPVYPQETDDACIFPDGGPCPSGSWSQKRSFVYVWKTWDQVPFSVSVSQLRALDGGNKHFLRNQPLTFALQLHDPSGYLAEADLSYTWDFGDSSGTLISRALVVTHTYLEPGPVTAQVVLQAAIPLTSCGSSPVPGTTDGHRPTAEAPNTTAGQVPTTEVVGTTPGQAPTAEPSGTTSVQVPTTEVISTAPVQMPTAESTGMTPEKVPVSEVMGTTLAEMSTPEAT

SEQ ID NO: 98847 - protein, 280 aa, Homo sapiens
  MOD_RES (1)..(1): Any amino acid
XQEHQQQVLQAVERAKQVTVGELNSLIGVSSSVVYGRSPVMAFESHPHLRGSSVSSSLPSIPGGKPAYSFHVSADGQMQPVPFPSDALVGAGIPRHARQLHTLAHGEVVCAVTISGSTQHVYTGGKGCVKVWDVGQPGAKTPVAQLDCLNRDNYIRSCKLLPDGRSLIVGGEASTLSIWDLAAPTPRIKAELTSSAPACYALAVSPDAKVCFSCCSDGNIVVWDLQNQTMVRQFQGHTDGASCIDISDYGTRLWTGGLDNTVRCWDLREGRQLQQHDFSS

SEQ ID NO: 98848 - protein, 72 aa, Homo sapiens
MIILGLVFIFQFVISCSCLAINRSKQTDVINASWWVMSNKTRDELERSFDCCGLFNLTTLYQQDYDFCTAIC

SEQ ID NO: 98849 - protein, 195 aa, Homo sapiens
MLRAALPALLLPLLGLAAAAVAGADMISIHNEEENAFILDTLKKQWKGPDDILLGMFYDTDDASFKWFDNSNMTFDKWTDQDDDEDLVDTCAFLHIKTGEWKKGNCEVSSVEGTLCKTAIPYKRKYLSDNHILISALVIASTVILTVLGAIIWFLYKKHSDSRFTTVFSTAPQSPYNEDCVLVVGEENEYPVQFD

SEQ ID NO: 98850 - protein, 330 aa, Homo sapiens
LTLETYQEWCNDSAATHDPLSQLPAPQHPKIRLYNAEQVLSWEPVALSNSTRPVVYQVQFKYTDSKWFTADIMSIGVNCTQITATECDFTAASPSAGFPMDFNVTLRLRAELGALHSAWVTMPWFQHYRNVTVGPPENIEVTPGEGSLIIRFSSPFDIADTSTAFFCYYVHYWEKGGIQQVKGPFRSNSISLDNLKPSRVYCLQVQAQLLWNKSNIFRVGHLSNISCYETMADASTELQQVILISVGTFSLLSVLAGACFFLVLKYRGLIKYWFHTPPSIPLQIEEYLKDPTQPILEALDKDSSPKDDVWDSVSIISFPEKEQEDVLQTL

SEQ ID NO: 98851 - protein, 136 aa, Homo sapiens
MSKRSWWAGSRKPPREMLKLSGSDSSQSMNGLEVAPPGLITNFSLATAEQCGQETPLENMLFASFYLLDFILALVGNTLALWLFIRDHKSGTPANVFLMHLAVADLSCVLVLPTRLVYHFSGNHWPFGEIACRLTG

SEQ ID NO: 98852 - protein, 64 aa, Homo sapiens
MAEGEDVGWWRSWLQQSYQAVKEKSSEALEFMKRDLTEFTQVVQHDTACTIAATASVVKEKLAG

SEQ ID NO: 98853 - protein, 567 aa, Homo sapiens
MSGDLLELALKLPHVDYIEEDSSVFAQSIPWNLERITPPRYRADEYQPPDGGSLVEVYLLDTSIQSDHREIEGRVMVTDFENVPEEDGTRFHRQASKCDSHGTHLAGVVSGRDAGVAKGASMRSLRVLNCQGKGTVSGTLIGLEFIRKSQLVQPVGPLVVLLPLAGGYSRVLNAACQRLARAGVVLVTAAGNFRDDACLYSPASAPEVITVGATNAQDQPVTLGTLGTNFGRCVDLFAPGEDIIGASSDCSTCFVSQSGTSQAAAHVAGIAAMMLSAEPELTLAELRQRLIHFSAKDVINEAWFPEDQRVLTPNLVAALPPSTHGAGWQLFCRTVWSAHSGPTRMATAVARCAPDEELLSCSSFSRSGKRRGERMEAQGGKLVCRAHNAFGGEGVYAIARCCLLPQANCSVHTAPPAEASMGTRVHCHQQGHVLTGCSSHWEVEDLGTHKPPVLRPRGQPNQCVGHREASIHASCCHAPGLECKVKEHGIPAPQEQVTVACEEGWTLTGCSALPGTSHVLGAYAVDNTCVVRSRDVSTTGSTSEGAVTAVAICCRSRHLAQASQELQ

SEQ ID NO: 98854 - protein, 150 aa, Homo sapiens
MDGFYDQQVPFMVPGKSRSEECRGRPVIDRKRKFLDTDLAHDSEELFQDLSQLQEAWLAEAQVPDDEQFVPDFQSDNLVLHAPPPTKIKRELHSPSSELSSCSHEQALGANYGEKCLYNYCAYDRKPPSGFKPLTPPTTPLSPTHQNPLF

SEQ ID NO: 98855 - protein, 20 aa, Homo sapiens
MAEDKTKPSELDQGKYDADD

SEQ ID NO: 98856 - protein, 107 aa, Homo sapiens
MSPSLQEGAQLGENKPSTCSFSIERILGLDQKKDCVPLMKPHRPWADTCSSSGKDGNLCLHVPNPPSGISFPSVVDHPMPEERASKYENYFSASERLSLKRELSWYR

SEQ ID NO: 98857 - protein, 258 aa, Homo sapiens
MLKAVILIGGPQKGTRFRPLSFEVPKPLFPVAGVPMIQHHIEACAQVPGMQEILLIGFYQPDEPLTQFLEAAQQEFNLPVRYLQEFAPLGTGGGLYHFRDQILAGSPEAFFVLNADVCSDFPLSAMLEAHRRQRHPFLLLGTTANRTQSLNYGCIVENPQTHEVLHYVEKPSTFISDIINCGIYLFSPEALKPLRDVFQRNQQDGQLEDSPGLWPGAGTIRLEQDVFSALAGQGQIYVHLTDGIWSQIKSAGPLNQDS

SEQ ID NO: 98858 - protein, 341 aa, Homo sapiens
  MOD_RES (1)..(1): Any amino acid
XMMNDSCQNLPKINQQRPRSKTTAGKTGDTKSLNKEHPNQEVVDNTRLESANFGLHISRIRKDSGEENAHPRRGQIIDFQGLLTDAIKGATSELALNTFDHNPDPSERLLKPLSAFIGMNSEMRELAAVVSRYPQLFTGILSPWKGLLLYGPPGTGKTLLAKAVATECKTTFFNISASTIVSKWRGDSEKLVRVLFELARYHAPSTIFLDELESVMSQRGTASGGEHEGSLRMKTELLVQMDGLARSEDLVFVLAASNLPWELDCAMLRRLEKRILVDLPSREARQAMIYHWLPPVSKSRALELHTELEYSVLSQTEGYSGSDIKLVCREAAMRPVRKIFD

SEQ ID NO: 98859 - protein, 186 aa, Homo sapiens
MAPVGVEKKLLLGPNGPAVAAAGDLTSEEEEGQSLWSSILSEVSTRARSKLPSGKNILVFGEDGSGKTTLMTKLQGAEHGKKGRGLEYLYLSVHDEDRDDMSRPWTVMESLQKWASVLREHIDKMKIPPEKMRELERKFVKDFQDYMEPEEGCQGSPQRRGPLTSGSDEENVALPLGDNVLTHNLG

SEQ ID NO: 98860 - protein, 151 aa, Homo sapiens
AKSPPPMNLGMNNRKPDLRVLIPPGSKNTMPSVSEDVDLLLNQRINNSQSAQSLATPVVSVATPTLPGQGMGGYPSAISTTYGTEYSLSSADLSSLSGFNTASALHLGSVTGWQQQHLHNMPPSALSQLGPYHHPFEIPTTHAPRGGEISC

SEQ ID NO: 98861 - protein, 37 aa, Homo sapiens
MNSTLNFFIQSYNNASNDTYLYRVQRLIRSQMQQVHC

SEQ ID NO: 98862 - protein, 236 aa, Homo sapiens
  MOD_RES (1)..(1): Any amino acid
XHALKDILGPPMYEMEVSQRLSQPGVAIGLAWTPLGGEIMFVEASRMDGEGQLTLTGQLGDVMKESAHLAISWLRSNAKKYQLTNAFGSFDLLDNTDIHLHFPAGAVTKDGPSAGVTIVTCLASLFSGRLVRSDVAMTGEITLRGLVLPVGGIKDKVLAAHRAGLKQVIIPRRNEKDLEGIPGNIEESLPKSIVAYDHLAQVGKQNFQLACVFLSAVRLRRTAGDHRIFPVSLRLT

SEQ ID NO: 98863 - protein, 78 aa, Homo sapiens
MLLWPLRGWAARALRCFGPGSRGSPASGPGPRRVQRRAWPPDKEQEKEKKSVRRRLAVLPRLASNSWAQVILWHQPPE

SEQ ID NO: 98864 - protein, 111 aa, Homo sapiens
MCTHYTQIVWATTNKIGCAVNTCRKMTVWGEVWENAVYFVCNYSPKGNWIGEAPYKNGRPCSECPPSYGGSCRNNLCYREETYTPKPETDEMNEVETAPIPEENHVWLQPR

SEQ ID NO: 98865 - protein, 92 aa, Homo sapiens
MASLSRPSLPSCLCSFLLLLLLQVSSSYADPFYWVSPGVLVLLAVLPVLLLQITVGLIFLCLQYRLRGKLRAEIENLHRTFGQFLEELRNPF

SEQ ID NO: 98866 - protein, 96 aa, Homo sapiens
MSGAPTAGAALMLCAATAVLLSAQGGPVQSKSPRFASWDEMNVLAHGLLQLGQGLREHAERTRSQLSALERRLSACGSACQGTEGSTDLPLAPESR

SEQ ID NO: 98867 - protein, 137 aa, Homo sapiens
  MOD_RES (1)..(1): Any amino acid
XWSHGLIRIIRAKATTDCNSLNGVLQCTCEDSYTWFPPSCLDPQNCYLHTAGALPSCECHLNNLSQSVNFCERTKIWGTFKINERFTNDLLNSSSAIYSKYANGIEIQLKKAYERIQGFESVQVTQFRTVIHLWNLV

SEQ ID NO: 98868 - protein, 56 aa, Homo sapiens
MAAAELTAPAQVVLEQGMRRHLISRALLHSGCHRLGFLRPFLLPRRPTPVRYVAQS

SEQ ID NO: 98869 - protein, 870 aa, Homo sapiens
MVWDRQTKMEYEWKPDEQGLQQILQLLKESQSPDTTIQRTVQQKLEQLNQYPDFNNYLIFVLTKLKSEDEPTRSLSGLILKNNVKAHFQNFPNGVTDFIKSECLNNIGDSSPLIRATVGILITTIASKGELQNWPDLLPKLCSLLDSEDYNTCEGAFGALQKICEDSAEILDSDVLDRPLNIMIPKFLQFFKHSSPKIRSHAVACVNQFIISRTQALMLHIDSFIENLFALAGDEEPEVRKNVCRALVMLLEVRMDRLLPHMHNIVEYMLQRTQDQDENVALEACEFWLTLAEQPICKDVLVRHLPKLIPVLVNGMKYSDIDIILLKGDVEEDETIPDSEQDIRPRFHRSRTVAQQHDEDGIEEEDDDDDEIDDDDTISDWNLRKCSAAALDVLANVYRDELLPHILPLLKELLFHHEWVVKESGILVLGAIAEGCMQGMIPYLPELIPHLIQCLSDKKALVRSITCWTLSRYAHWVVSQPPDTYLKPLMTELLKRILDSNKRVQEAACSAFATLEEEACTELVPYLAYILDTLVFAFSKYQHKNLLILYDAIGTLADSVGHHLNKPEYIQMLMPPLIQKWNMLKDEDKDLFPLLECLSSVATALQSGFLPYCEPVYQRCVNLVQKTLAQAMLNNAQPDQYEAPDKDFMIVALDLLSGLAEGLGGNIEQLVARSNILTLMYQCMQDKMPEVRQSSFALLGDLTKACFQHVKPCIADFMPILGTNLNPEFISVCNNATWAIGEISIQMGIEMQPYIPMVLHQLVEIINRPNTPKTLLENTAITIGRLGYVCPQEVAPMLQQFIRPWCTSLRNIRDNEEKDSAFRGICTMISVNPSGVIQDFIFFCDAVASWINPKDDLRDMFCKVLQSWRL

SEQ ID NO: 98870 - protein, 48 aa, Homo sapiens
MGIRGLMSFVEDHSNEFFTDLKLRDTKIVIDGYALFHRLCFSSNLDLR

SEQ ID NO: 98871 - protein, 120 aa, Homo sapiens
MPDSPVDVKTQSRLTPPTMPPPPTTQGAPRTSSFTPTTLTNGTSHSPTALNGAPSPPNGFSNGPSSSSSSSLANQQLPPACGARQLSKLKRFLTTLQQFGNDISPEIGERVRTLVLGLVN

SEQ ID NO: 98872 - protein, 94 aa, Homo sapiens
  MOD_RES (1)..(1): Any amino acid
XLSAQGTVTFEDVAVNFTWEEWNLLSEAQRCLYRDVTLENLALISSLGMTFLHVCQALDSLRQVIHPPTSASQSAGITGSHSIPQARVRWHHLG

SEQ ID NO: 98873 - protein, 126 aa, Homo sapiens
MPGEATETVPATEQELPQPQAETGSGTESDSDESVPELEEQDSTQATTQQAQLAAAAEIDEEPVSKAKQSRSEKKARKAMSKLGLRQVTGVTRVTIRKSKNILFVITKPDVYKSPASDTYIVFGEA

SEQ ID NO: 98874 - protein, 313 aa, Homo sapiens
MMAAMATARVRMGPRCAQALWRMPWLPVFLSLAAAAAAAAAEQQVPLVLWSSDRDLWAPAADTHEGHITSDLQLSTYLDPALELGPRNVLLFLQDKLSIEDFTAYGGVFGNKQDSAFSNLENALDLAPSSLVLPAVDWYAVSTLTTYLQEKLGASPLHVDLATLRELKLNASLPALLLIRLPYTASSGLMAPREVLTGNDEVIGQVLSTLKSEDVPYTAALTAVRPSRVARDVAVVAGGLGRQLLQKQPVSPVIHPPVSYNDTAPRILFWAQNFSVAYKDQWEDLTPLTFGVQELNLTGSFWNDSFASPAQAP

SEQ ID NO: 98875 - protein, 156 aa, Homo sapiens
MQLKPMEINPEMLNKVLSRLGVAGQWRFVDVLGLEEESLGSVPAPACALLLLFPLTAQHENFRKKQIEELKGQEVSPKVYFMKQTIGNSCGTIGLIHAVANNQDKLGFEDGSVLKQFLSETEKMSPEDRAKCFEKNEAIQAAHDAVAQEGQCRMTR

SEQ ID NO: 98876 - protein, 176 aa, Homo sapiens
LAFWFDVAFIGSIQSYDISIVAQVDQTGSKSSNLLDLKNPFFRYTGTTPSPPPGSHYTSPSENMWNTGSTYNLSSGMAVAGMPTAYDLSSVIASGSSVGHNNLIPLANTGIVNHTHSRMGSIMSTGIVQGSSGAQGSGGGSTSAHYAVNSQFTMGGPAISMASPMSIPTNTMHYGS

SEQ ID NO: 98877 - protein, 100 aa, Homo sapiens
MGSLSPVATPTHPGLACKTVFQTPTPTPCSIPDNPTKTSGPKGAMRCCWSTCRTWQAHWVACWLSPSYCRLWCSLACGTCKQHWRGLEGSLMREERPRAI

SEQ ID NO: 98878 - protein, 175 aa, Homo sapiens
MDSSQHLVTFEDVAVDFTQEEWTLLDQAQRDLYRDVMLENYKNLIILGSELFKRSLMSGLEQMEELRTGVTGVLQELDLQLKTKGSPLLQDISAERSPNGVQLERSNTAEKLYDSNHSGKVFNEHPFLMTHMITHIGEKTSEDNQSGKALRKNFPHSFYKKSHAEGKMPKCVKHE

SEQ ID NO: 98879 - protein, 131 aa, Homo sapiens
MRVMAPRTLILLLSGALALTETWACSHSMRYFYTAVSRPGRGEPRFIAVGYVDDTQFVRFDSDAASPRGEPRAPWVEQEGPEYWDRETQKYKRQAQTDRVSLRNLRGYYNQSEAVDVWLRPGARRAPPPRV

SEQ ID NO: 98880 - protein, 80 aa, Homo sapiens
  MOD_RES (1)..(1): Any amino acid
XMRKGELFDYLTEKVALSEKETRSIMRSLLEAVSFLHANNIVHRDLKPENILLDDNMQIRLSDFGFSCHLEPGEKLRGRQ

SEQ ID NO: 98881 - protein, 50 aa, Homo sapiens
MEPPIPQSAPLTPNSVMVQPLLDSRMSHSRLQHPLTILPIDQVKTSHVEN

SEQ ID NO: 98882 - protein, 202 aa, Homo sapiens
MAGRPHPYDGNSSDPENWDRKLHSRPRKLYKHSSTSSRIAKGGVDHTKMSLHGASGGHERSRDRRRSSDRSRDSSHERTESQLTPCIRNVTSPTRQHHVEREKDHSSSRPSSPRPQKASPNGSISSAGNSSRNSSQSSSDGSCKTAGEMVFVYENAKEGARNIRTSERVTLIVDNTRFVVDPSIFTAQPNTMLGRMFGSGLL

SEQ ID NO: 98883 - protein, 546 aa, Homo sapiens
  MOD_RES (1)..(1): Any amino acid
XDIAEGKASQPSVVISQVIDMRDEEFSVSSVLASDVIHASRKDIPCIFRVTASQLSASNNKCSILMLADTENEKNKWVGVLSELHKILKKNKFRDRSVYVPKEAYDSTLPLIKTTQAAAIIDHERIALGNEEGLFVVHVTKDEIIRVGDNKKIHQIELIPNDQLVAVISGRNRHVRLFPMSALDGRETDFYKLSETKGCQTVTSGKVRHGALTCLCVAMKRQVLCYELFQSKTRHRKFKEIQVPYNVQWMAIFSEQLCVGFQSGFLRYPLNGEGNPYSMLHSNDHTLSFIAHQPMDAICAVEISSKEYLLCFNSIGIYTDCQGRRSRQQELMWPANPSSCCYNAPYLSVYSENAVDIFDVNSMEWIQTLPLKKVRPLNNEGSLNLLGLETIRLIYFKNKMAEGDELVVPETSDNSRKQMVRNINNKRRYSFRVPEEERMQQRREMLRDPEMRNKLISNPTNFNHIAHMGPGDGIQILKDLPMNPRPQESRTVFSGSVSIPSITKSRPEPGRSMSASSGLSASKCRGYRKVPLRQGDPQLPPLLSRG

SEQ ID NO: 98884 - protein, 387 aa, Homo sapiens
GGQDKPFLSAWPGTVVSEGQHVTLQCRSRLGFNEFSLSKEDGMPVPELYNRIFRNSFLMGPVTPAHAGTYRCCSSHPHSPTGWSAPSNPVVIMVTGVHRKPSLLAHPGPLVKSGETVILQCWSDVRFERFLLHREGITEDPLRLVGQLHDAGSQVNYSMGPMTPALAGTYRCFGSVTHLPYELSAPSDPLDIVVVGLYGKPSLSAQPDPTVQAGENVTLSCSSRSLFDIYHLSREAEAGELRLTAVLRVNGTFQANFPLGPVTHGGNYRCFGSFRALPHAWSDPSDPLPVSVTGNSRHLHVLIGTSVVIIPFAILLFFLLHRWCANKKNAVVMDQEPAGNRTVNREDSDEQDPQEVTYAQLNHCVFTQRKITRPSQRPKTPPTDTSV

SEQ ID NO: 98885 - protein, 1109 aa, Homo sapiens
MSLDFRRHFVNLSPFTITVVLLLSACFVTSSLGGTDKELRLVDGENKCSGRVEVKVQEEWGTVCNNGWSMEAVSVICNQLGCPTAIKAPGWANSSAGSGRIWMDHVSCRGNESALWDCKHDGWGKHSNCTHQQDAGVTCSDGSNLEMRLTRGGNMCSGRIEIKFQGRWGTVCDDNFNIDHASVICRQLECGSAVSFSGSSNFGEGSGPIWFDDLICNGNESALWNCKHQGWGKHNCDHAEDAGVICSKGADLSLRLVDGVTECSGRLEVRFQGEWGTICDDGWDSYDAAVACKQLGCPTAVTAIGRVNASKGFGHIWLDSVSCQGHEPAIWQCKHHEWGKHYCNHNEDAGVTCSDGSDLELRLRGGGSRCAGTVEVEIQRLLGKVCDRGWGLKEADVVCRQLGCGSALKTSYQVYSKIQATNTWLFLSSCNGNETSLWDCKNWQWGGLTCDHYEEAKITCSAHREPRLVGGDIPCSGRVEVKHGDTWGSICDSDFSLEAASVLCRELQCGTVVSILGGAHFGEGNGQIWAEEFQCEGHESHLSLCPVAPRPEGTCSHSRDVGVVCSRYTEIRLVNGKTPCEGRVELKTLGAWGSLCNSHWDIEDAHVLCQQLKCGVALSTPGGARFGKGNGQIWRHMFHCTGTEQHMGDCPVTALGASLCPSEQVASVICSGNQSQTLSSCNSSSLGPTRPTIPEESAVACIESGQLRLVNGGGRCAGRVEIYHEGSWGTICDDSWDLSDAHVVCRQLGCGEAINATGSAHFGEGTGPIWLDEMKCNGKESRIWQCHSHGWGQQNCRHKEDAGVICSEFMSLRLTSEASREACAGRLEVFYNGAWGTVGKSSMSETTVGVVCRQLGCADKGKINPASLDKAMSIPMWVDNVQCPKGPDTLWQCPSSPWEKRLASPSEETWITCDNKIRLQEGPTSCSGRVEIWHGGSWGTVCDDSWDLDDAQVVCQQLGCGPALKAFKEAEFGQGTGPIWLNEVKCKGNESSLWDCPARRWGHSECGHKEDAAVNCTDISVQKTPQKATTGRSSRQSSFIAVGILGVVLLAIFVALFFLTKKRRQRQRLAVSSRGENLVHQIQYREMNSCLNADDLDLMNSSGGHSEPH

SEQ ID NO: 98886 - protein, 129 aa, Homo sapiens
MDEGGTPLLPDSLVYQIFLSLGPADVLAAGLVCRQWQAVSRDEFLWREQFYRYYQVARDVPRHPAAMSWYEEFQRLYDTVPCVEVQTLREHTDQVLHLSFSHSGYQFASCSKDCTVKIWSNDLTISLLH

SEQ ID NO: 98887 - protein, 369 aa, Homo sapiens
MALAMLRDWCRWMGANAERSLLILGIPDDCKEHEFQEAVRAALSPLGRREQPGCEEESFESWVEHAKDMLQLWCHASEREKKRWLLESLGGPALEVVSGLLEEDTNLSALDCLAALGQVFRNQDTRMTSRLKFLTCTQGPQEGLFAFVVRLEGLLQRAVEKGAVCPALANYLRLQQVLSWARPSEALQDTLRGMQLEKRPPGFLGLLRLIREMEAWAAFPARSQQGVAWAAAPVESEDPAAAQASPAQGNASEAGPGAEDAAEAASATKEAARGAPAAGEGESAPAGPEGLGQARPIEVPWGSSPARMSSAVWVFPRGLSWGPEGLIQVRGQEARKPPLEGLQTILEEPENEDEDGAGDEGQPKSSQGK

SEQ ID NO: 98888 - protein, 137 aa, Homo sapiens
MVIEAYGHGQRTFGENYVQELLEKASNPKILSLCPEIKWHFIGHLQKQNVNKLMAVPNLFMLETVDSVKLADKVNSSWQRKGSPERLKVMVQINTSGEESKHGLPPSETIAIVEHINAKCPNLEFVGLMTIGSFGHD

SEQ ID NO: 98889 - protein, 464 aa, Homo sapiens
MAHLKRLVKLHIKRHYHKKFWKLGAVIFFFIIVLVLMQREVSVQYSKEESRMERNMKNKNKMLDLMLEAVNNIKDAMPKMQIGAPVRQNIDAGERPCLQGYYTAAELKPVLDRPPQDSNAPGASGKAFKTTNLSVEEQKEKERGEAKHCFNAFASDRISLHRDLGPDTRPPECIEQKFKRCPPLPTTSVIIVFHNEAWSTLLRTVHSVLYSSPAILLKEIILVDDASVDEYLHDKLDEYVKQFSIVKIVRQRERKGLITARLLGATVATAETLTFLDAHCECFYGWLEPLLARIAENYTAVVSPDIASIDLNTFEFNKPSPYGSNHNRGNFDWSLSFGWESLPDHEKQRRKDETYPIKTPTFAGGLFSISKEYFEYIGSYDEEMEIWGGENIEMSFRVWQCGGQLEIMPCSVVGHVFRSKSPHSFPKGTQVIARNQVRLAEVWMDEYKEIFYRRNTDAAKIVKQ

SEQ ID NO: 98890 - protein, 66 aa, Homo sapiens
  MOD_RES (1)..(1): Any amino acid
XENEEPDSDNEWQHLLETTEPVPIQLKAPLTLLCNPDFCQRIQSQLHEAGGQVKGWRREGADGNGT

SEQ ID NO: 98891 - protein, 162 aa, Homo sapiens
MNKEVKDNQEMKSRILVIKAAEDSALQYMNFMNVIFAAQKQNILIDACVLDSDSGLLQQACDITGGLYLKVPQMPSLLQYLLWVFLPDQDQRSQLILPPPVHVDYRAACFCHRNLIEIGYVCSVCLSIFCNFSPICTTCETAFKISLPPVLKAKKKKLKVSA

SEQ ID NO: 98892 - protein, 165 aa, Homo sapiens
MATDSGDPASTEDSEKPDGISFENRVPQVAATLTVEARLKEKNSTFSASGETVERKRFFRKSVEMTEDDKVAESSPKDERIKAAMNIPRVDKLPSNVLRGGQEVKYEQCSKSTSEISKDCFKEKNEKEMEEEAEMKAVATSPSGRFLKFDIELGRGAFKTVYKGL

SEQ ID NO: 98893 - protein, 134 aa, Homo sapiens
  MOD_RES (1)..(1): Any amino acid
XNTFGRLSDTLLFYAYIFVLSITVIVAFVVAFHNLSDSTNQQSVGKMEKGTVDLKPETAYNLIHTILFGFLALSTMRMKYLWTSHMCVFASFGLCSPEIWELLLKSVHLYNPKRICIMRYSVPILILLYLCYKL

SEQ ID NO: 98894 - protein, 128 aa, Homo sapiens
  MOD_RES (1)..(1): Any amino acid
XISAVQWLCNANKKSENPAKRLYCFFASLFSVLVRGSRAVLQLYPENSEQLELITTQATKAGFSGGMVVDYPNSAKAKKFYLCLFSGPSTFIPEVPIKDVEAGNGEEESGMGAGEEGAAQAPGQGSQT

SEQ ID NO: 98895 - protein, 331 aa, Homo sapiens
MKNWDSLDEHGVCTADKDCEDAYRVCQILDIPFHQVSYVKEYWNDVFSDFLNEYEKGRTPNPDIVCNKHIKFSCFFHYAVDNLGADAIATGHYARTSLEDEEVFEQKHVKKPEGLFRNRFEVRNAVKLLQAADSFKDQTFFLSQVSQDALRRTIFPLGGLTKEFVKKIAAENRLHHVLQKKESMGMCFIGKRNFEHFLLQYLQPRPGHFISIEDNKVLGTHKGWFLYTLGQRANIGGLREPWYVVEKDSVKGDVFVAPRTDHPALYRDLLRTSRVHWIAEEPPAALVRDKMMECHFRFRHQMALVPCVLTLNQDGTVWVTAVQAVRALATG

SEQ ID NO: 98896 - protein, 255 aa, Homo sapiens
MPSPRPVLLRGARAALLLLLPPRLLARPSLLLRRSLSAASCPPISLPAAASRSSMDGAGAEEVLAPLRLAVRQQGDLVRKLKEDKAPQVDVDKAVAELKARKRVLEAKELALQPKDDIVDRAKMEDTLKRRFFYDQAFAIYGGVSGLYDFGPVGCALKNNIIQTWRQHFIQEEQILEIDCTMLTPEPVLKTSGHVDKFADFMVKDVKNGECFRADHLLKAHLQKLMSDKKCSVEKKSEMESVLAQICVLGEQFVF

SEQ ID NO: 98897 - protein, 132 aa, Homo sapiens
MSGSREVMLLQLTVIKVMTTRILSVKTEFHAKEQYRDVIKILLESAKVDSKLICMFQNSDKLLSHMAAQCLALLLYFQLREKITLSNSWIAFCQKNLSEYSESNKAIYCLWTLTAIIKEIFKDSCSQKTEIL

SEQ ID NO: 98898 - protein, 203 aa, Homo sapiens
MALRLLKLAATSASARVVAAGAQRVRGIHSSVQCKLRYGMWHFLLGDKASKRLTERSRVITVDGNICTGKGKLAKEIAEKLGFKHFPEAGIHYPDSTTGDGKPLATDYNGNCSLEKFYDDPRSNDGNSYRLQSWLYSSRLLQYSDALEHLLTTGQGVVLERSIFSDFVFLEAMYNQGFIRKQYWGGWSQWKAGIWELRGSTVD

SEQ ID NO: 98899 - protein, 273 aa, Homo sapiens
MADILSQSETLASQDLSGDFKKPALPVSPAARSKAPASSSSNPEEGPEEDREAESELTVTQLKELRKQQQILLEKKMLGEDSDEEEEMDTSERKINAGSQDDEMGCTWGMGEDAVEDDAEENPIVLEFQQEREAFYIKDPKKALQGFFDREGEELEYEFDEQGHSTWLCRVRLPVDDSTGKQLVAEAIHSGKKKEAMIQCSLEACRILDTLGLLRQEAVSRKRKAKNWEDEDFYDSDDDTFLDRTGLIEKKRLNRMKKAGKIDEKPETFESLV

SEQ ID NO: 98900 - protein, 150 aa, Homo sapiens
MHRTTRIKITELNPHLMCVLCGGYFIDATTIIECLHSFCKTCIVRYLETSKYCPICDVQVHKTRPLLNIRSDKTLQDIVYKLVPGLFKNEMKRRRDFYAAHPSADAANGSNEDRGEVADEDKRIITDDEIISLSIEFFDQNRLDRKVNKD

SEQ ID NO: 98901 - protein, 152 aa, Homo sapiens
MWATCCNWFCLDGQPEEVPPPQGARMQAYSNPGYSSFPSPTGLEPSCKSCGAHFANTARKQTCLDCKKNFCMTCSSQVGNGPRLCLLCQRFRATAFQREELMKMKVKDLRDYLSLHDISTEMCREKEELVLLVLGQQPVISQEDRTRASTLS

SEQ ID NO: 98902 - protein, 132 aa, Homo sapiens
MAARGRRAEPQGREAPGPAGGGGGGSRWAESGSGTSPESGDEEVSGAGSSPVSGGVNLFANDGSFLELFKRKMEEEQRQRQEEPPPGPQRPDQSAAAAGPGDPKRKGGGQTQRREQTSPQDGNSSQEAEDGG

SEQ ID NO: 98903 - protein, 24 aa, Homo sapiens
MSWVQATLLARGLCRAWGGTCGAA

SEQ ID NO: 98904 - protein, 92 aa, Homo sapiens
APPKPKPPPLTKETVVFWDMRLWHVVGIFSLFVLSIIITLCCVFNCRVPRTRKEIEARYLQRKAAKMYTDKLETVPPLNELTEVPGGELALA

SEQ ID NO: 98905 - protein, 210 aa, Homo sapiens
MMTPQVITPQQMQQILQQQVLSPQQLQVLLQQQQALMLQQQLQEFYKKQQEQLQLQLLQQQHAGKQPKEQQQVATQQLAFQQQLLQMQQLQQQHLLSLQRQGLLTIQPGQPALPLQPLAQGMIPTELQQLWKEVTSAHTAEETTGNNHSSLDLTTTCVSSSAPSKTSLIMNPHASTNGQLSVHTPKRESLSHEEHPHSHPLYGHGVCKWP

SEQ ID NO: 98906 - protein, 33 aa, Homo sapiens
  MOD_RES (1)..(1): Any amino acid
XEIMQGFIRAFRPLPRHLWYLLDLKQMEEPCRF

SEQ ID NO: 98907 - protein, 99 aa, Homo sapiens
MGCCYSSENEDSDQDREERKLLLDPSSPPTKALNGAEPNYHSLPSARTDEQALLSSILAKTASNIIDVSAADSQGMEQHEYMDRARQYRHTGHHTEKEL

SEQ ID NO: 98908 - protein, 1246 aa, Homo sapiens
MANGGGGGGGSSGGGGGGGGSSLRMSSNIHANHLSLDASSSSSSSSSSSSSSSSSSSSSSVHEPKMDALIIPVTMEVPCDSRGQRMWWAFLASSMVTFFGGLFIILLWRTLKYLWTVCCHCGGKTKEAQKINNGSSQADGTLKPVDEKEEAVAAEVGWMTSVKDWAGVMISAQTLTGRVLVVLVFALSIGALVIYFIDSSNPIESCQNFYKDFTLQIDMAFNVFFLLYFGLRFIAANDKLWFWLEVNSVVDFFTVPPVFVSVYLNRSWLGLRFLRALRLIQFSEILQFLNILKTSNSIKLVNLLSIFISTWLTAAGFIHLVENSGDPWENFQNNQALTYWECVYLLMVTMSTVGYGDVYAKTTLGRLFMVFFILGGLAMFASYVPEIIELIGNRKKYGGSYSAVSGRKHIVVCGHITLESVSNFLKDFLHKDRDDVNVEIVFLHNISPNLELEALFKRHFTQVEFYQGSVLNPHDLARVKIESADACLILANKYCADPDAEDASNIMRVISIKNYHPKIRIITQMLQYHNKAHLLNIPSWNWKEGDDAICLAELKLGFIAQSCLAQGLSTMLANLFSMRSFIKIEEDTWQKYYLEGVSNEMYTEYLSSAFVGLSFPTVCELCFVKLKLLMIAIEYKSANRESRILINPGNHLKIQEGTLGFFIASDAKEVKRAFFYCKACHDDITDPKRIKKCGCKRLIYSKMSIYKRMRRACCFDCGRSERDCSCMSGRVRGNVDTLERAFPLSSVSVNDCSTSFRAFEDEQPSTLSPKKKQRNGGMRNSPNTSPKLMRHDPLLIPGNDQIDNMDSNVKKYDSTGMFHWCAPKEIEKVILTRSEAAMTVLSGHVVVCIFGDVSSALIGLRNLVMPLRASNFHYHELKHIVFVGSIEYLKREWETLHNFPKVSILPGTPLSRADLRAVNINLCDMCVILSANQNNIDDTSLQDKECILASLNIKSMQFDDSIGVLQANSQGFTPPGMDRSSPDNSPVHGMLRQPSITTGVNIPIITELVNDTNVQFLDQDDDDDPDTELYLTQPFACGTAFAVSVLDSLMSATYFNDNILTLIRTLVTGGATPELEALIAEENALRGGYSTPQTLANRDRCRVAQLALLDGPFADLGDGGCYGDLFCKALKTYNMLCFGIYRLRDAHLSTPSQCTKSKKSSSVHSIPSTANRQNRPKSRESRDKQNATRMNRMGQAEKKWFTDEPDNAYPRNIQIKPMSTHMANQINQYKSTSSLIPPIREVEDEC

SEQ ID NO: 98909 - protein, 217 aa, Homo sapiens
MNSQPQTRSPFFQRPQIQPPRATIPNSSPSIRPGAQTPTAVYQANQHIMMVNHLPMPYPVPQGPQYCIPQYRHSGPPYVGPPQQYPVQPPGPGPFYPGPGPGDFPNAYGTPFYPSQPVYQSAPIIVPTQQQPPPAKREKKTIRIRDPNQGGKDITEEIMSGGGSRNPTPPIGRPTSTPTPPQQLPSQVPEHSPVVYGTVESAHLAASTPVTAASDQK

SEQ ID NO: 98910 - protein, 146 aa, Homo sapiens
  MOD_RES (1)..(1): Any amino acid
XEVEVGGGAAGERELDEVDMSDLSPEEQWRVEHARMHAKHRGHEAMHAEMVLILIATLVVAQLLLVQWKQRHPRSYNDQTRRCHGLWHLPSLLWPLLWSSGTGLCRNVCRLHGIYHRVLQRVGHAYQTSFRQCVCCVWAADLCGRQ

SEQ ID NO: 98911 - protein, 132 aa, Homo sapiens
LLVSTRGDNEKVQRELSHLQSENDAAKDEVKEVLQALEELAVNYDQKSQEVEEKSQQNQLLVDELSQKVPVEISGAIEEEFTVARLYISKIKSEVKSVVKRCRQLENLQVECHRKMEVTGRELSSCQLLISQ

SEQ ID NO: 98912 - protein, 771 aa, Homo sapiens [sequence omitted]

SEQ ID NO: 98913 - protein, 998 aa, Homo sapiens
MSEQTPAEAGAAGAREDACRDYQSSLEDLTFNSKPHINMLTILAEENLPFAKEIVSLIEAQTAKAPSSEKLPVMYLMDSIVKNVGREYLTAFTKNLVATFICVFEKVDENTRKSLFKLRSTWDEIFPLKKLYALDVRVNSLDPAWPIKPLPPNVNTSSIHVNPKFLNKSPEEPSTPGTVVSSPSISTPPIVPDIQKNLTQEQLIRQQLLAKQKQLLELQQKKLELELEQAKAQLAVSLSVQQETSNLGPGSAPSKLHVSQIPPMAVKAPHQVPVQSEKSRPGPSLQIQDLKGTNRDPRLNRISQHSHGKDQSHRKEFLMNTLNQSDTKTSKTIPSEKLNSSKQEKSKSGEKITKKELDQLDSKSKSKSKSPSPLKNKLSHTKDLKNQESESMRLSDMNKRDPRLKKHLQDKTDGKDDDVKEKRKTAEKKDKDEHMKSSEHRLAGSRNKIINGIVQKQDTITEESEKQGTKPGRSSTRKRSRSRSPKSRSPIIHSPKRRDRRSPKRRQRSMSPTSTPKAGKIRQSGAKQSHMEEFTPPSREDRNAKRSTKQDIRDPRRMKKTEEERPQETTNQHSTKSGTEPKENVENWQSSKSAKRWKSGWEENKSLQQVDEHSKPPHLRHRESWSSTKGILSPRAPKQQQHRLSVDANLQIPKELTLASKRELLQKTSERLASGEITQDDFLVVVHQIRQLFQYQEGKHRCNVRDSPTEENKGGLKKKPLLSDAELTYYEHKAKLKRTQVQHSFPRLDLLDPDIFDYPLTDALLSGIECEPSKSKHASRNSGAQFDRKEQFSERARRLSPISGSRTYAENLSPHEGRRRHDEQVSAKGVREEQRSPFNDRFPLKRPRYEDSDKPFVDSPASRFAGLDTNQRLTALAEDRPLFDGPSRPSVARDGPTKMIFEGPNKLSPRIDGPPTPASLRFDGSPGQMGGGGPLRFEGPQGQLGGGCPLRFEGPPGPVGTPLRFEGPIGQAGGGGFRFEGSPGLRFEGSPGGLRFEG

SEQ ID NO: 98914 - protein, 130 aa, Homo sapiens
MSSDRQRSDDESPSTSSGSSDADQRDPAAPEPEEQEERKPSATQQKKNTKLSSKTTAKLSTSAKRIQKELAEITLDPPPNCRGCPCPLLVTTCANSESLERKISKSCIECKDIQIENEELVLSVSSSLSI

SEQ ID NO: 98915 - protein, 566 aa, Homo sapiens
MKMQKGNVLLMFGLLLHLEAATNSNETSTSANTGSSVISSGASTATNSGSSVTSSGVSTATISGSSVTSNGVSIVTNSEFHTTSSGISTATNSEFSTVSSGISIATNSESSTTSSGASTATNSESSTPSSGASTATNSDSSTTSSGASTATNSDSSTTSSEASTATNSESSTTSSGASTVTNSESSTVSSRASTATNSESSTTSSGASTATNSESRTTSNGAGTATNSESSTTSSGASTATNSESSTPSSGAGTATNSESSTTSSGAGTATNSESSTVSSGISTVTNSESSTPSSGANTATNSESSTTSSGANTATNSDSSTTSSGASTATNSESSTTSSGASTATNSESSTTSSGASTATNSGSSTTSSGTSTATNSESSTVSSGASTATTSESSTTSSGASTATNSESSTVSSGASTATNSESSTTSSGANTATNSGSSVTSAGSGTAALTGMHTTSHSASTAVSEAKPGGSLVPWEIFLITLVSVVAAVGLFAGLFFCVRNSLSLRNTFNTAVYHPHGLNHGLGPGPGGNHGAPHRPRWSPNWFWRRPVSSIAMEMSGRNSGP

SEQ ID NO: 98916 - protein, 669 aa, Homo sapiens
MDADKEKDLQKFLKNVDEISNLIQEMNSDDPVVQQKAVLETEKRLLLMEEDQEEDECRTTLNKTMISPPQTAMKSAEEINSEAFLASVEKDAKERAKRRRENKVLADALKEKGNEAFAEGNYETAILRYSEGLEKLKDMKVLYTNRAQAYMKLEDYEKALVDCEWALKCDEKCTKAYFHMGKANLALKNYSVSRECYKKILEINPKLQTQVKGYLNQVDLQEKADLQEKEAHELLDSGKNTAVTTKNLLETLSKPDQIPLFYAGGIEILTEMINECTEQTLFRMHNGFSIISDNEVIRRCFSTAGNDAVEEMVCVSVLKLWQAVCSRNEENQRVLVIHHDRARLLAALLSSKVLAIRQQSFALLLHLAQTESGRSLIINHLDLTRLLEALVSFLDFSDKEANTAMGLFTDLALEERFQVWFQANLPGVLPALTGVLKTDPKVSSSSALCQCIAIMGNLSAEPTTRRHMAACEEFGDGCLSLLARCEEDVDLFREVIYTLLGLMMNLCLQAPFVSEVWAVEVSRRCLSLLNSQDGGILTRAAGVLSRTLSSSLKIVEEALRAGVVKKMMKFLKTGGETASRYAIKILAICTNSYHEAREEVIRLDKRAPTPPLETRLVPGNQSLLVQQAEELGFSILKRMWPGWNSITILKPQQRWQNSLGPHPSGCVYQ

SEQ ID NO: 98917 - protein, 399 aa, Homo sapiens
  MOD_RES (371)..(371): Any amino acid
MEPLFPAPFWEVIYGSHLQGNLSLLSPNHSLLPPHLLLNASHGAFLPLGLKVTIVGLYLAVCVGGLLGNCLVMYVILRHTKMKTATNIYIFNLALADTLVLLTLPFQGTDILLGFWPFGNALCKTVIAIDYYNMFTSTFTLTAMSVDRYVAICHPIRALDVRTSSKAQAVNVAIWALASVVGVPVAIMGSAQVEDEEIECLVEIPTPQDYWGPVFAICIFLFSFIVPVLVISVCYSLMIRRLRGVRLLSGSREKDRNLRRITRLVLVVVAVFVGCWTPVQVFVLAQGLGVQPSSETAVAILRFCTALGYVNSCLNPILYAFLDENFKACFRKFCCASALRRDVQVSDRVRSIAKDVALACKTSETVPRPAXLGVDLPMVPVSPQSPSTPNTELTQVTAL

SEQ ID NO: 98918 - protein, 110 aa, Homo sapiens
MFDKTRLPYVALDVLCVLLASMPMAVLKLGQIYPFQRGFFCKDNSINYPYHDSTVTSTVLILVGVGLPISSLDCLLQFLLQGIPPSNEEYSVMMSPSSTLTKKTPYLMRY

SEQ ID NO: 98919 - protein, 344 aa, Homo sapiens
MLLSVTSRPGISTFGYNRNNKKPYVSLAQQMAPPSPSNSTPNSSSGSNGNDQLSKTNLYIRGLQPGTTDQDLVKLCQPYGKIVSTKAILDKTTNKCKGYGFVDFDSPSAAQKAVTALKASGVQAQMAKQQEQDPTNLYISNLPLSMDEQELEGMLKPFGQVISTRILRDTSGTSRGVGFARMESTEKCEAIITHFNGKYIKTPPGVPAPSDPLLCKFADGGPKKRQNQGKFVQNGRAWPRNADMGVMALTYDPTTALQNGFYPAPYNITPNRMLAQSALSPYLSSPVSSYQYMPTAAAMQGAYISQYTPVPSSSVSVEESSGQQNQVAVDAPSEHGVYSFQFNK

SEQ ID NO: 98920 - protein, 79 aa, Homo sapiens
MSENGSFANCCEAGGWAVRPGWSGAGSARPSRTPRPPWVAPALSAVLIVTTAVDVVGNLLVILSVLRNRKLRNAGISYL

SEQ ID NO: 98921 - protein, 91 aa, Homo sapiens
MASALSYVSKFKSFVILFVTPLLLLPLVILMPAKFVRCAYVIILMAIYWCTEVIPLAVTSLMPVLLFPLFQILDSRQGDTTRACIPTPSCP

SEQ ID NO: 98922 - protein, 162 aa, Homo sapiens
MRLFGGNFAHQASVARVVGQQGRGRAGIEASLDVQYLMSAGANISTWVYSSPGRHEGQEPFLQWLMLLSNESALPHVHTVSYGDDEDSLSSAYIQRVNTELMKAAARGLTLLFASGDSGAGCWSVSGRHQFRPTFPASRSQAPNLLCGIQLPLFLFVSSQAF

SEQ ID NO: 98923 - protein, 172 aa, Homo sapiens
QPQNGRMLVSKDATLLLPSYEKYGTIVIQYVFPPGVQGAEHPNPGVRYPGTTRVAYLPDCPEGNKVLTLFRKAFDQRLTFTIGTSMTTGRPNVITWNDIHHKTSCTGGPQLCDPSSFPFPWLLPFVPFPLRDPPTPRSRSLLTGENHFQTVQPSQFLLHSTWSWCAQLSLQK

SEQ ID NO: 98924 - protein, 187 aa, Homo sapiens
  MOD_RES (1)..(1): Any amino acid
XSCSDSVEYLTLNFGPFETVHRWRRLPPCDEFVGARRSKHTVVAYKDAIYVFGGDNGKTMLNDLLRFDVKDCSWCRAFTTGTPPAPRYHHSAVVYGSSMFVFGGYTGDIYSNSNLKNKNDLFEYKFATGQWTEWKIEGRLNDMWTIGLQDRELTCWEEVAQSGEIPPSCCNFPVAVCRDKMFVFSGQ

SEQ ID NO: 98925 - protein, 441 aa, Homo sapiens
MAACEGRRSGALGSSQSDFLTPPVGGAPWAVATTVVMYPPPPPPPHRDFISVTLSFGENYDNSKSWRRRSCWRKWKQLSRLQRNMILFLLAFLLFCGLLFYINLADHWKALAFRLEEEQKMRPEIAGLKPANPPVLPAPQKADTDPENLPEISSQKTQRHIQRGPPHLQIRPPSQDLKDGTQEEATKRQEAPVDPRPEGDPQRTVISWRGAVIEPEQGTELPSRRAEVPTKPPLPPARTQGTPVHLNYRQKGVIDVFLHAWKGYRKFAWGHDELKPVSRSFSEWFGLGLTLIDALDTMWILGLRKEFEEARKWVSKKLHFEKDVDVNLFESTIRILGGLLSAYHLSGDSLFLRKAEDFGNRLMPAFRTPSKIPYSDVNIGTGVAHPPRWTSDSTVAEVTSIQLEFRELSRLTGDKKFQAAGRLRGSHRGCQNAPAAALRAQ

SEQ ID NO: 98926 - protein, 1274 aa, Homo sapiens
MGHLTLEDYQIWSVKNVLANEFLNLLFQVCHIVLGLRPATPEEEGQIIRGWLERESRYGLQAGHNWFIISMQWWQQWKEYVKYDANPVVIEPSSVLNGGKYSFGTAAHPMEQVEDRIGSSLSYVNTTEEKFSDNISTASEASETAGSGFLYSATPGADVCFARQHNTSDNNNQCLLGANGNILLHLNPQKPGAIDNQPLVTQEPVKATSLTLEGGRLKRTPQLIHGRDYEMVPEPVWRALYHWYGANLALPRPVIKNSKTDIPELELFPRYLLFLRQQPATRTQQSNIWVNMGNVPSPNAPLKRVLAYTGCFSRMQTIKEIHEYLSQRLRIKEEDMRLWLYNSENYLTLLDDEDHKLEYLKIQDEQHLVIEVRNKDMSWPEEMSFIANSSKIDRHKVPTEKGATGLSNLGNTCFMNSSIQCVSNTQPLTQYFISGRHLYELNRTNPIGMKGHMAKCYGDLVQELWSGTQKNVAPLKLRWTIAKYAPRFNGFQQQDSQELLAFLLDGLHEDLNRVHEKPYVELKDSDGRPDWEVAAEAWDNHLRRNRSIVVDLFHGQLRSQVKCKTCGHISVRFDPFNFLSLPLPMDSYMHLEITVIKLDGTTPVRYGLRLNMDEKYTGLKKQLSDLCGLNSEQILLAEVHGSNIKNFPQDNQKVRLSVSGFLCAFEIPVPVSPISASSPTQTDFSSSPSTNEMFTLTTNGDLPRPIFIPNGMPNTVVPCGTEKNFTNGMVNGHMPSLPDSPFTGYIIAVHRKMMRTELYFLSSQKNRPSLFGMPLIVPCTVHTRKKDLYDAVWIQVSRLASPLPPQEASNHAQDCDDSMGYQYPFTLRVVQKDGNSCAWCPWYRFCRGCKIDCGEDRAFIGNAYIAVDWDPTALHLRYQTSQERVVDEHESVEQSRRAQAEPINLDSCLRAFTSEEELGENEMYYCSKCKTHCLATKKLDLWRLPPILIIHLKRFQFVNGRWIKSQKIVKFPRESFDPSAFLVPRDPALCQHKPLTPQGDELSEPRILAREVKKVDAQSSAGEEDVLLSKSPSSLSANIISSPKGSPSSSRKSGTSCPSSKNSSPNSSPRTLGRSKGRLRLPQIGSKNKLSSSKENLDASKENGAGQICELADALSRGHVLGGSQPELVTPQDHEVALANGFLYEHEACGNGYSNGQLGNHSEEDSTDDQREDTRIKPIYNLYAISCHSGILGGGHYVTYAKNPNCKWYCYNDSSCKELHPDEIDTDSAYILFYEQQGIDYAQFLPKTDGKKMADTSSMDEDFESDYKKYCVLQ

SEQ ID NO: 98927 - protein, 266 aa, Homo sapiens
DPTRFTGTMDAFVKIVRHEGTRTLWSGLPATLVMTVPATAIYFTAYDQLKAFLCGRALTSDLYAPMVAGALARLGTVTVISPLELMRTKLQAQHVSYRELGACVRTAVAQGGWRSLWLGWGPTALRDVPFSVHPPPQALYWFNYELVKSWLNGFRPKDQTSVGMSFVAGGISGTVAAVLTLPFDVVKTQRQVALGAMEAVRVNPLHVDSTWLLLRRIRAESGTKGLFAGFLPRIIKAAPSCAIMISTYEFGKSFFQRLNQDRLLGG

SEQ ID NO: 98928 - protein, 440 aa, Homo sapiens
MNGLKEVRYACAVLLWAPWHLVGSKGMGRGVGMRPQLCFRHSRPAFMCFIYKSWSDIYFEHSSMGSLLSVCESSLSRSPVFGAAGRSRQKMRLCLTQPICDTVADASFPRPLILFLVPVPGRMLPLTMTVLILLLLPTGQAAPKDGVTRPDSEVQHQLLPNPFQPGQEQLGLLQSYLKGLGRTEVQLEHLSREQVLLYLFALHDYDQSGQLDGLELLSMLTAALAPGAANSPTTNPVILIVDKVLETQDLNGDGLMTPAELINFPGVALRHVEPGEPLAPSPQEPQAVGRQSLLAKSPLRQETQEAPGPREEAKGQVEARRESLDPVQEPGGQAEADGDVPGPRGEAEGQAEAKGDAPGPRGEAGGQAEAEGDAPGPRGEAGGQAEAEGDAPGPRGEAGGQAEARENGEEAKELPGETLESKNTQNDFEVHIVQVENDEI

SEQ ID NO: 98929 - protein, 75 aa, Homo sapiens
MTEYKLVVVGAGGVGKSALTIQLIQNHFVDEYDPTIEGVDDAFYTLVREIRKHKEKMSKDGKKKKKKSKTKCVIM

SEQ ID NO: 98930 - protein, 208 aa, Homo sapiens
MKEPLDGECGKAVVPQQELLDKIKEEPDNAQEYGCVQQPKTQESKLKIGGVSSVNERPIAQQLNPGFQLSFASSGPSVLLPSVPAVAIKVFCSGCKKMLYKGQTAYHKTGSTQLFCSTRCITRHSSPACLPPPPKKTCTNCSKDILNPKDVITTRFENSYPSKDFCSQSCLSSYELKKKPVVTIYTKSISTKCSMCQKNADTRFEVKY

SEQ ID NO: 98931 - protein, 315 aa, Homo sapiens
MEVMKSIIQKYQHKRISLVEAGVTRHRSIFNGLKALAEDQINSKLSKPEVVIIHDAVRPFVEEGVLLKVVTAAKEHGAAGAIRPLVSTVVSPSADGCLDYSLERARHRASEMPQAFLFDVIYEAYQQVTYKRDLYAAESIIKERISQEICVVMDTEEDNKHVGHLLEEVLKSELNHVKVTSEALGHAGRHLQQIILDQCYNFVCVNVTTSDFQETQKLLSMLEESSLCILYPVVVVSVHFLDFKLVPPSQKMENLMQIREFAKEVKERNILLYGLLISYPQDDQKLQESLRQGAIIIASLIKERNSGLIGQLLIA

SEQ ID NO: 98932 - protein, 128 aa, Homo sapiens
MGLLAFLKTQFVLHLLVGFVFVVSGLVINFVQLCTLALWPVSKQLYRRLNCRLAYSLWSQLVMLLEWWSCTECTLFTDQATVERFGKEHAVIILNHNFEIDFLCGWTMCERFGVLGSSKVLAKKELLY

SEQ ID NO: 98933 - protein, 102 aa, Homo sapiens
MGEIKVSPDYNWFRGTVPLKKIIVDDDDSKIWSLYDAGPRSIRCPLIFLPPVSGTADVFFRQILALTGWGYRVIALQYPVYWDHLEFCDGFRKLLDHLQLDK

SEQ ID NO: 98934 - protein, 583 aa, Homo sapiens
MAYSWQTDPNPNESHEKQYEHQEFLFVNQPHSSSQVSLGFDQIVDEISGKIPHYESEIDENTFFVPTAPKWDSTGHSLNEAHQISLNEFTSKSRELSWHQVSKAPAIGFSPSVLPKPQNTNKECSWGSPIGKHHGADDSRFSILAPSFTSLDKINLEKELENENHNYHIGFESSIPPTNSSFSSDFMPKEENKRSGHVNIVEPSLMLLKGSLQPGMWESTWQKNIESIGCSIQLVEVPQSSNTSLASFCNKVKKIRERYHAADVNFNSGKIWSTTTAFPYQLFSKTKFNIHIFIDNSTQPLHFMPCANYLVKDLIAEILHFCTNDQLLPKDHILSVCGSEEFLQNDHCLGSHKMFQKDKSVIQLHLQKSREAPGKLSRKHEEDHSQFYLNQLLEFMHIWKVSRQCLLTLIRKYDFHLKYLLKTQENVYNIIEEVKKICSVLGCVETKQITDAVNELSLILQRKGENFYQSSETSAKGLIEKVTTELSTSIYQLINVYCNSFYADFQPVNVPRCTSYLNPGLPSHLSFTVYAAHNIPETWVHSYKAFSFTCWLTYAGKKLCQVRNYRNIPDKKLFFFLVNWNET

SEQ ID NO: 98935 - protein, 407 aa, Homo sapiens
MRLLAWLIFLANWGGARAEPGKFWHIADLHLDPDYKVSKDPFQVCPSAGSQPVPDAGPWGDYLCDSPWALINSSIYAMKEIEPEPDFILWTGDDTPHVPDEKLGEAAVLEIVERLTKLIREVFPGAFYCEKLPGPSGAGRIVVLNTNLYYTSNALTADMADPGQQFQWLEDVLTDASKAGDMVYIVGHVPPGFFEKTQNKAWFREGFNEKYLKVVRKHHRVIAGQFFGHHHTDSFRMLYDDAGVPISAMFITPGVTPWKTTLPGVVNGANNPAIRVFEYDRATLSLKDMVTYFMNLSQANAQGTPRWELEYQLTEAYGVPDASAHSMHTVLDRIAGDQSTLQRYYVYNSVSYSAGVCDEACSMQHVCAMRQVDIDAYTTCLYASGTTPVPQLPLLLMALLGLCTLVL

SEQ ID NO: 98936 - protein, 115 aa, Homo sapiens
MVIHGWTVTGMYESWVPKLVAALYKREPDSNVIVVDWLSRAQEHYPVSAGYTKLVGQDVARFINWMEEEFNYPLDNVHLLGYSLGAHAAGIAGSLTNKKVNRITGLDPAGPNFEY

SEQ ID NO: 98937 - protein, 142 aa, Homo sapiens
  MOD_RES (1)..(1): Any amino acid
XKKLRARLALAHKTFSNFIESIVLEKENTHERSPSSPKGEKEKSRLRQGSWRAFLKSKDAGSPKKPTLVSLPLGPEVLSPAETDSHCEERAEDKEGYVFSDHWAPPLASTPLSSSLVSPEHRRKSEPTIKCTATQEGDAKPR

SEQ ID NO: 98938 - protein, 134 aa, Homo sapiens
MANRELAFKAGDVIKVLDASNKDWWWGQIDDEEGWFPASFVRLWVNQEDEVEEGPSDVQNGHLDPNSDCLCLGRPLQNRDQMRANVINEIMSTERHYIKHLKDICEGYLKQCRKRRDMFSDEQLKVIFGNIEDI

SEQ ID NO: 98939 - protein, 415 aa, Homo sapiens
MLGFLSARQTGLEDPLRLRRAESTRRVLGLELNKDRDVERIHGGGINTLDIEPVEGRYMLSGGSDGVIVLYDLENSSRQSYYTCKAVCSIGRDHPDVHRYSVETVQWYPHDTGMFTSSSFDKTLKVWDTNTLQTADVFNFEETVYSHHMSPVSTKHCLVAVGTRGPKVQLCDLKSGSCSHILQGHRQEILAVSWSPRYDYILATASADSRVKLWDVRRASGCLITLDQHNGKKSQAVESANTAHNGKVNGLCFTSDGLHLLTVGTDNRMRLWNSSNGENTLLTGQARSLTPVIPALWEAEVNYGKVCNNSKKGLKFTVSCGCSSEFVFVPYGSTIAVYTVYSGEQITMLKGHYKTVDCCVFQSNFQELYSGSRDCNILAWVPSLYEPVPDDDETTTKSQLNPAFEDAWSSSDEEG

SEQ ID NO: 98940 - protein, 219 aa, Homo sapiens
MAAGVEAAAEVAATEIKMEEESGAPGVPSGNGAPGPKGEGERPAQNEKRKEKNIKRGGNRFEPYANPTKRYRAFITNIPFDVKWQSLKDLVKEKGIVVEFKMEESMKKAAEVLNKHSLSGRPLKVKEDPDGEHARRAMQKAGRLGSTVFVANLDYKVGWKKLKEVFSMAGVVVRADILEDKDGKSRGIGTVTFEQSIEAVQAISMFNGQLLFDRPMHVK

SEQ ID NO: 98941 - protein, 180 aa, Homo sapiens
MGELASESQGSKELGDVLFQMAEVHRQIQNQLEEMLKSFHNELLTQLEQKVELDSRYLSAALKKYQTEQRSKGDALDKCQAELKKLRKKSQGSKNPQKYSDKELQYIDAISNKQGELENYVSDGYKTALTEERRRFCFLVEKQCAVAKNSAAYHSKGKELLAQKLPLWQQACADPSKIPE

SEQ ID NO: 98942 - protein, 96 aa, Homo sapiens
MPTYQIRAPTAALPQGVVMAASPGSLHSPQQLAEEATRKRELRLMKNREAAKECRRRKKEYVKCLESRVAVLEVQNKKLIEELETLKDICSPKTDY

SEQ ID NO: 98943 - protein, 121 aa, Homo sapiens
MANYSHAADNILQNLSPLTAFLKLTSLGFIIGVSVVGNLLISILLVKDKTLHRAPYYFLLDLCCSDILRSAICFPFVFNSVKNGSTWTYGTLTCKVIAFLGVLSCFHTAFMLFCISVTRYL

SEQ ID NO: 98944 - protein, 206 aa, Homo sapiens
  MOD_RES (1)..(1): Any amino acid
XLLASAPEAEGACPSCEGVQGPPMAPEKYTGEEDGAGGHSPAPPQTEECLRERPSTCPPRDQGTPEVQPTPAKDTWKGKRPRSQQENPESQPQKRPRPSAKPSVVAEVKGSVSASEQGTLNPTAQDPFQLSAPGVSLKEAANVVVKCLTPFYKEGKFASKPIDPSQSGPHGWVFWDTCRGQKVEGGGAAAGRRGRKSGPSPSSKSG

SEQ ID NO: 98945 - protein, 198 aa, Homo sapiens
  MOD_RES (1)..(1): Any amino acid
XDFLTRIISQLQEAHEEKNELECALKRKIAAYDEEIQHLYEEMEQQIKSEKEQFLLKDTERFQARSQELEQKLLCKEQELEQLTQKQKRLEGQCTALHHDKHETKAENTKLKLTNQELARELERTSWELQDAQQQLESLQQEACKLHQEKEMEVYRVTESLQREKAGLLKQLDFLRCVGGHWPVLRAPPRSLGSEGPV

SEQ ID NO: 98946 - protein, 327 aa, Homo sapiens
MTMAGGRRGLVAPQNTFLENIVRRSNDTNFVLGNAQIVDWPIVYSNDGFCKLSGYHRAEVMQKSSTCSFMYGELTDKDTIEKVRQTFENYEMNSFEILMYKKNRTPVWFFVKIAPIRNEQDKVVLFLCTFSDITAFKQPIEDDSCKGWGKFARLTRALTSSRGVLQQLAPSVQKGENVHKHSRLAEVLQLGSDILPQYKQEAPKTPPHIILHYCVFKTTWDWIILILTFYTAILVPYNVSFKTRQNNVAWLVVDSIVDVIFLVDIVLNFHTTFVGPAGEVISDPKLIRMNYLKTWFVIDLLSCLPYDVINAFENVDEHFSMPPSSGM

SEQ ID NO: 98947 - protein, 234 aa, Homo sapiens
TRRAMTLKSLLRALVNMPPHYRYLCISHLIGWTAFLSNMLFFTDFMGQIVYRGDPYSAHNSTEFLIYERGVEVGCWGLCINSVFSSLYSYFQKVLVSYIGLKGLYFTGYLLFGLGTGFIGLFPNVYSTLVLCSLFGVMSSTLYTVPFNLITEYHREEEKERQQAPGGDPDNSVRGKGMDCATLTCMVQLAQILVGGGLGFLVNTAGTVVVVVITASAVALIGCCFVALFVRYVD

SEQ ID NO: 98948 - protein, 111 aa, Homo sapiens
MSSPNIWSTGSSVYSTPVFSQKMTVWILLLLSLYPGFTSQKSDDDYEDYASNKTWVLTPKVPEGDVTVILNNLLEGYDNKLRPDIGVKPTLIHTDMYVNSIGPVNAINMHH

SEQ ID NO: 98949 - protein, 109 aa, Homo sapiens
MPFTLHLRSRLPSAIRSLILQKKPNIRNTSSMAGELRPASLVVLPRSLAPAFERFCQVNTGPLPLLGQSEPEKWMLPPQGAISETRMGHPQFWKYEFGACTGSLASLEQ

SEQ ID NO: 98950 - protein, 89 aa, Homo sapiens
MPLEQRSQHCKPEEGLEARGEALGLVGAQAPATEEQQTASSSSTLVEVTLGEVPAADSPSPPHSPQGASSFSTTINYTLWRQSDEGSSN

SEQ ID NO: 98951 - protein, 46 aa, Homo sapiens
MLVGNKSDLRHLRAVPTDEARAFAEKNNLSFIETSALDSTNVEEAF

SEQ ID NO: 98952 - protein, 47 aa, Homo sapiens
MTGKTQTSNVTNKNDPKSINSRVFIGNLNTAIVKKVDIEAIFSKYGK

SEQ ID NO: 98953 - protein, 444 aa, Homo sapiens
MKRFGSLRSNKKHKDQNRSTERRQSEPHGLFASGLSSSPSTPTQVTKQHTFPLESYKHEPERLENRIYASSSPPDTGQRFCPSSFQSPTRPPLASPTHYAPSKAAALAAALGPAEAGMLEKLEFEDEVEDSESGVYMRFMRSHKCYDIVPTSSKLVVFDTTLQVKKAFFALVANGVRAAPLWESKKQSFVGMLTITDFINILHRYYKSPMVQIYELEEHKIETWRELYLQETFKPLVNISPDASLFDAVYSLIKNKIHRLPVIDPISGNALYILTHKRILKFLQLFMSDMPKPAFMKQNLDELGIGTYHNIAFIHPDTPIIKALNIFVERRISALPVVDESGKVVDIYSKFDVINLAAEKTYNNLDITVTQALQHRSQYFEGVVKCNKLEILETIVDRIVRAEVHRLVVVNEADSIVGIISLSDILQALILTPAGAKQKETETE

SEQ ID NO: 98954 - protein, 34 aa, Homo sapiens
  MOD_RES (1)..(1): Any amino acid
XQQMYAATKGLRCVAQEALPWNDGDNTAPRYRLS

SEQ ID NO: 98955 - protein, 162 aa, Homo sapiens
MKQTHADTPVDHCLSGIRKCSSTFKLKSEVNKHETALEMQNPNLNNKECCFTFTLNGNSRKLDRSVFTAYGKPSESIYSALSANDYFSERIKNQFNKNIIVYEEKTIDGHINLGMPLKCLPSDSHFKITFGQRKSSKEDGHILRQCENPNMECILFHVVAIG

SEQ ID NO: 98956 - protein, 162 aa, Homo sapiens
MEAAVAPGRDAPAPAASQPSGCGKHNSPERKVYMDYNATTPLEPEVIQAMTKAMWEAWGNPSSPYSAAVTFVPVSKVSGQAEVDDILAAVRPTTRLVTIMLANNETGIVMPVPEISQRIKALNQERVAAGLPPILVHTDAAQALGKQRVDVEDLGVDFLTIV

SEQ ID NO: 98957 - protein, 545 aa, Homo sapiens
  MOD_RES (1)..(1): Any amino acid
XALELEGPLITPGSGTDVLYIGPLKGSIYSSPGLYSKTMTPTYDAHDGSPLSPTSAWFGDSALSEGNPGILAVSQPITSPEILAKMFKPQALLDKAKINQGWLDSSRSLMEQDVKENEALLLRFKYYSFFDLNPKYDAIRINQLYEQAKWAILLEEIECTEEEMMMFAALQYHINKLSIMTSENHLNNSDKEVDEVDAALSDLEITLEGGKTSTILGDITSIPELADYIKVFKPKKLTLKGYKQYWCTFKDTSISCYKSKEESSGTPAHQMNLRGCEVTPDVNISGQKFNIKLLIPVAEGMNEIWLRCDNEKQYAHWMAACRLASKGKTMADSSYNLEVQNILSFLKMQHLNPDPQLIPEQITTDITPECLVSPRYLKKYKNKQEKGCKKHMPGYIRDLITARILEAHQNVAQMSLIEAKMRFIQAWQSLPEFGITHFIARFQGGKKEELIGIAYNRLIRMDASTGDAIKTWRFSNMKQWNVNWEIKMVTVEFADEVRLSFICTEVDCKVVHEFIGGYIFLSTRAKDQNESLDEEMFYKLTSGWV

SEQ ID NO: 98958 - protein, 126 aa, Homo sapiens
MAAATADPGAGNPQPGDSSGGGAGGGLPSPGEQELSRRLQRLYPAVNQQETPLPRSWSPKDKYNYIGLSQGNLRVHYKGHGKNHKDAASVRATHPIPAACGIYYFEVKIVSKGRDGLGQTFLWLPW

SEQ ID NO: 98959 - protein, 133 aa, Homo sapiens
MITPLASAETNEDMAVVWKLLREGNVNIQATQGGQTALMLGVSHDREDMVQALLSCQADVNLQDHDGSSALMVACHHGNVDLVRLLLAHPACDSSLTDKAGRTALSIALKSPTHMEIAGLLRAHAEQGRSLGL

SEQ ID NO: 98960 - protein, 112 aa, Homo sapiens
MGLRTAKKRGLGGGGKWKREEGGGTRGRREVRPACFLQSGGRGDPGDVGGPAGNPGCSPHPRAATRPPPLPAHTPAHTPEWCGAASAEAAEPRRAVREFTLLHTRDVAGMQR

SEQ ID NO: 98961 - protein, 208 aa, Homo sapiens
MMLSLNNLQNIIYNPVIPFVGTIPDQLDPGTLIVIRGHVPSDADRFQVDLQNGSSMKPRADVAFHFNPRFKRAGCIVCNTLINEKWGREEITYDTPFKREKSFEIVIMVLKDKFQVAVNGKHTLLYGHRIGPEKIDTLGIYGKVNIHSIGFSFSSDLQSTQASSLELTEISRENVPKSGTPQLPSNRGGDISKIAPRTVYTKSKDSTV

SEQ ID NO: 98962 - protein, 301 aa, Homo sapiens
  MOD_RES (1)..(1): Any amino acid
XAARRTHEHVSEKTSESPSKPGEKKGSDEKKAASLGSSQSSRTYAGGTASATKVSASSGATSKSSSMNPTETKAVKTEPEKKSQSTKLSVVHEKKSQEGKPKEHTEPKSLPKQASDTGSNDAHNKKAVSRSAEQQPSEKSTEPKKKEKKSLTPAVPVESKPDKPSGKSGMDAALDDLIDTLGGPEETEEENTTYTGPEVSDPMSSTYIEELGKREVTIPPKYRELLAKKEGITGPPADSSKPIGPDDAIDALSSDFTCGSPTAAGKKTEKEESTEVLKAQSAGTVRSAAPPQEKKRKVEKV

SEQ ID NO: 98963 - protein, 159 aa, Homo sapiens
  MOD_RES (1)..(1): Any amino acid
XLLWYIVPLVVVYFAEYFINQGLFELLFFWNTSLSHAQQYRWYQMLYQAGVFASRSSLRCCRIRFTWALALLQCLNLVFLLADVWFGFLPSIYLVFLIILYEGLLGGAAYVNTFHNIALETSDEHREFAMAATCISDTLGISLSGLLALPLHDFLCQLS

SEQ ID NO: 98964 - protein, 174 aa, Homo sapiens
MLLLPNRDKGVQLRNMAQETNHSQVPMLCSTGCGFYGNPRTNGMCSVCYKEHLQRQNSSNGRISPPATSVSSLSESLPVQCTDGSVPEAQSALDSTSSSMQPSPVSNQSLLSESVASSQLDSTSVDKAVPETEDVQASVSDTAQQPSEEQSKSLEKPKQKKNRCFMCRKKVGLT

SEQ ID NO: 98965 - protein, 187 aa, Homo sapiens
LLCCTFQPVNNNLTVVRLQDTHSPRVGNAKHNVHVMNISTGKKVKGGSSKLTGRVLALSFDAPGRLLWAGDDRGSVFSFLFDMATGKLTKAKRLVVHEGSPVTSISARSWVSREARDPSLLINACLNKLLLYRVVDNEGTLQLKRSFPIEQSSHPVRSIFCPLMSFRQGACVVTGSEDMCVHFFDVE

SEQ ID NO: 98966 - protein, 481 aa, Homo sapiens
MANQVNGNAVQLKEEEEPMDTSSVTHTEHYKTLIEAGLPQKVAERLDEIFQTGLVAYVDLDERAIDALREFNEEGALSVLQQFKESDLSHVQNKSAFLCGVMKTYRQREKQGSKVQESTKGPDEAKIKVFVGKIPRDLYEDELVPLFEKAGPIWDLRLMMDPLSGQNRGYAFITFCGKEAAQEAVKLVKVLFVRNLATTVTEEILEKSFSEFGKLERVKKLKDYAFVHFEDRGAAVKAMDEMNGKEIEGEEIEIVLAKPPDKKRKERQAARQASRSTAYEDYYYHPPPRMPPPIRGRGRGGGRGGYGYPPDYYGYEDYYDDYYGYDYHDYRGGYEDPYYGYDDGYAVRGRGGGRGGRGAPPPPRGRGAPPPRGRAGYSQRGAPLGPPRGSRGGRGGPAQQQRGRGSRGSRGNRGGNVGGKRKADGYNQPDSKRRQTNNQQNWGSQPIAQQPLQQGGDYSGNYGYNNDNQEFYQDTYGQQWK

SEQ ID NO: 98967 - protein, 264 aa, Homo sapiens
MPVQLTTALRVVGTSLFALAVLGGILAAYVTGYQFIHTEKHYLSFGLYGAILGLHLLIQSLFAFLEHRRMRRAGQALKLPSPRRGSVALCIAAYQEDPDYLRKCLRSAQRISFPDLKVVMVVDGNRQEDAYMLDIFHEVLGGTEQAGFFVWRSNFHEAGEGETEASLQEGMDRVRDVVRASTFSCIMQKWGGKREVMYTAFKALGDSVDYIQVCDSDTVLDPACTIEMLRVLEEDPQVGGVGGDVQILNKYDSWISFLSSVRYW

SEQ ID NO: 98968 - protein, 80 aa, Homo sapiens
  MOD_RES (1)..(1): Any amino acid
XTGYMLRCSLSHAITLVCTAYGVSYLEKRSPCGCQERLTSQEYCKRRNFIRMEMGVRMWGFITSPKESTDSACPSLVCTK

SEQ ID NO: 98969 - protein, 151 aa, Homo sapiens
MSFCSFFGGEVFQNHFEPGVYVCAKCGYELFSSRSKYAHSSPWPAFTETIHADSVAKRPEHNRSEALKLQGLRGVYSRPVASARELPPQAIGRAWPSGANVGNRTGFLYGLQDKGVLWQVWQWVGPRVPERRPQAGAVPILNIQQLAEVCP

SEQ ID NO: 98970 - protein, 31 aa, Homo sapiens
  MOD_RES (1)..(1): Any amino acid
XSPQPKKKPLDGEYFTLQPPEVQKGSVYLPP

SEQ ID NO: 98971 - protein, 204 aa, Homo sapiens
MFTSTGSSGLYKAPLSKSLLLVPSALSLLLALLLPHCQKLFVYDLHAVKNDFQMSGLCYDSKMFQVHQVLCIPSWMAKFFSWTLEPIFSSSEPTSEARIGMGATLDIQRQQRMELLDRQLMFSQFAQGRRQRQQQGGMINWNRLFPPLRQRQNVNYQGGRQSEPAAPPLEVSEEQVARLMEMGFSRGDALEALRASNNDLNVAT

SEQ ID NO: 98972 - protein, 66 aa, Homo sapiens
  MOD_RES (1)..(1): Any amino acid
XWSNKKQHLTTEASPSKGPDTWREWSSDGKNLIIYWKMRKHSPFLKSLILSTKQRYDLIRMTTSSA

SEQ ID NO: 98973 - protein, 160 aa, Homo sapiens
MNSVSPAAAQYRSSSPEDARRRPEARRPRGPRGPDPNGLGPSGASGPALGSPGAGPSEPDEVDKFKAKFLTAWNNVKYDGGMEALLLSCKCFISLGAAPTSPQVGWLKAGPALARSPASTSVAAATVSRARVTYSVSSGTLCPACGSHTAGTSRPFLGAA

SEQ ID NO: 98974 - protein, 391 aa, Homo sapiens
MDWLVRNVTYRPHCHICFTPRGIMQFRFAHPTPRPSEKCSKWILLEDYRKRVQNVTEFDDSLLRNFTLVTQHPEVIYTNQNVVWSKFETIFFTISGLIHYAPVFRDYVFRSMQEFYEDNVLYMEIRARLLPVYELSGEHHDEEWSVKTYQEVAQKFVETHPEFIGIKIIYSDHRSKDVAVIAESIRMAMGLRIKFPTVVAGFDLVGHEDTGHSLHDYKEALMIPAKDGVKLPYFFHAGETDWQGTSIDRNILDALMLNTTRIGHGFALSKHPAVRTYSWKKDIPIEVCPISNQVLKLVSDLRNHPVATLMATGHPMVISSDDPAMFGAKGLSYDFYEVFMGIGGMKADLRTLKQLAMNSIKYSTLLESEKNTFMEIWKKRWDKFIADVATK

SEQ ID NO: 98975 - protein, 1505 aa, Homo sapiens
MEAATTLHPGPRPALPLGGPGPLGEFLPPPECPVFEPSWEEFADPFAFIHKIRPIAEQTGICKVRPPPDWQPPFACDVDKLHFTPRIQRLNELEAQTRVKLNFLDQIAKYWELQGSTLKIPHVERKILDLFQLNKLVAEEGGFAVVCKDRKWTKIATKMGFAPGKAVGSHIRGHYERILNPYNLFLSGDSLRCLQKPNLTTDTKDKEYKPHDIPQRQSVQPSETCPPARRAKRMRAEAMNIKIEPEETTEARTHNLRRRMGCPTPKCENEKEMKSSIKQEPIERKDYIVENEKEKPKSRSKKATNAVDLYVCLLCGSGNDEDRLLLCDGCDDSYHTFCLIPPLHDVPKGDWRCPKCLAQECSKPQEAFGFEQAARDYTLRTFGEMADAFKSDYFNMPVHMVPTELVEKEFWRLVSTIEEDVTVEYGADIASKEFGSGFPVRDGKIKLSPEEEEYLDSGWNLNNMPVMEQSVLAHITADICGMKLPWLYVGMCFSSFCWHIEDHWSYSINYLHWGEPKTWYGVPGYAAEQLENVMKKLAPELFVSQPDLLHQLVTIMNPNTLMTHEVPVYRTNQCAGEFVITFPRAYHSGFNQGFNFAEAVNFCTVDWLPLGRQCVEHYRLLHRYCVFSHDEMICKMASKADVLDVVVASTVQKDMAIMIEDEKALRETVRKLGVIDSERMDFELLPDDERQCVKCKTTCFMSAISCSCKPGLLVCLHHVKELCSCPPYKYKLRYRYTLDDLYPMMNALKLRAESYNEWALNVNEALEAKINKKKSLVSFKALIEESEMKKFPDNDLLRHLRLVTQDAEKCASVAQQLLNGKRQTRYRSGGGKSQNQLTVNELRQFVTQLYALPCVLSQTPLLKDLLNRVEDFQQHSQKLLSEETPSAAELQDLLDVSFEFDVELPQLAEMRIRLEQARWLEEVQQACLDPSSLTLDDMRRLIDLGVGLAPYSAVEKAMARLQELLTVSEHWDDKAKSLLKARPRHSLNSLATAVKEIEEIPAYLPNGAALKDSVQRARDWLQDVEGLQAGGRVPVLDTLIELVTRGRSIPVHLNSLPRLETLVAEVQAWKECAVNTFLTENSPYSLLEVLCPRCDIGLLGLKRKQRKLKEPLPNGKKKSTKLESLSDLERALTESKETASAMATLGEARLREMEALQSLRLANEGKLLSPLQDVDIKICLCQKAPAAPMIQCELCRDAFHTSCVAVPSISQGLRIWLCPHCRRSEKPPLEKILPLLASLQRIRVRLPEGDALRYMIERTVNWQHRAQQLLSSGNLKFVQDRVGSGLLYSRWQASAGQVSDTNKVSQPPGTTSFSLPDDWDNRTSYLHSPFSTGRSCIPLHGVSPEVNELLMEAQLLQVSLPEIQELYQTLLAKPSPAQQTDRSSPVRPSSEKNDCCRGKRDGINSLERKLKRRLEREGLSSERWERVKKMRTPKKKKIKLSHPKDMNNFKLERERSYELVRSAETHSLPSDTSYSEQEDSEDEDAICPAVSCLQPEGDELSPSRR

SEQ ID NO: 98976 - protein, 169 aa, Homo sapiens
MLADLGLIGTIGEDDEVPVEPESDSGDEEEEGPIVLGRRQKALGKNRSADFNPDFVFTEKEGTYDGSWALADVMSQLKKKRAATTLDEKIEKVRKKRKTEDKEAKSGKLEKEKEAKEGSEPKEQEDLQENDEEGSEDEASETDYSSADENILTKAGKLLHHAATKCPHL

SEQ ID NO: 98977 - protein, 102 aa, Homo sapiens
MAAMSLLRRVSVTAVAALSGRPLGTRLGFGGFLTRGFPKAAAPVRHSGDHGKRLFVIRPSRFYDRRFLKLLRFYIALTGIPVAIFITLVNVFIASHIKMDCP

SEQ ID NO: 98978 - protein, 138 aa, Homo sapiens
MNPASAPPPLPPPGQQVIHVTQDLDTDLEALFNSVMNPKPSSWRKKILPESFFKEPDSGSHSRQSSTDSSGGHPGPRLAGGAQHVRSHSSPASLQLGTGAGAAGSPAQQHAHLRQQSYDVTDELPLPPGWEMTFTATG

SEQ ID NO: 98979 - protein, 261 aa, Homo sapiens
  MOD_RES (1)..(1): Any amino acid
XAILACKTPKKTVSSRLEWKKLGRSVSFVYYQQTLQGDFKNRAEMIDFNIRIKNVTRSDAGKYRCEVSAPSEQGQNLEEDTVTLEVLVAPAVPSCEVPSSALSGTVVELRCQDKEGNPAPEYTWFKDGIRLLENPRLGSQSTNSSYTMNTKTGTLQFNTVSKLDTGEYSCEARNSVGYRRCPGKRMQVDDLNISGIIAAVVVVALVISVCGLGVCYAQRKGYFSKETSFQSGRPNFGSMGVERRWMTNYLRLWQLGVEKIY

SEQ ID NO: 98980 - protein, 283 aa, Homo sapiens
  MOD_RES (1)..(1): Any amino acid
XWDYRWQQVPKKAWRKLKLPGDSSLMTYRGHGVLHTLIRCRFSPIHSTGQQFIYSGCSTGKVVVYDLLSGHIVKKLTNHKACVRDVSWHPFEEKIVSSSELEHGRSQGHRTNRKGHRLLSGHILPHTRGQDPADVADLHPGPLLPPAPLPHLPAANRALPCVCHTCHCLSLSRGGPISPSSAAQQSKQLVGRGGNMERGPVVGAGLGAGARIQALLGCLLKVLLWVASALLYFGSEQAARLLGSPCLRRLYHAWLAAVVIFGPLLQFHVNPRTIFASHGNFFN

SEQ ID NO: 98981 - protein, 205 aa, Homo sapiens
  MOD_RES (1)..(1): Any amino acid
XDITGVKTVLISRLKQAIEEEGGDPDNIELTVSTDTPNKKPTKGKGKKHEADELSGDASVEDDAFIKDCELENQEAHEQDGNDELKDSEEFGENEEENVHSKELLSAEENKRAHELIEAEGIEDIEKEDIESQEIEAQEGEDDTFLTAQDGEEEENEKALQRNLKTARHHLKMTKEVQVVLVVAVEAQLKISGLVDFHLIPKLLI

SEQ ID NO: 98982 - protein, 145 aa, Homo sapiens
VQYNRTTDEELSELEDRVAVTASEVQQAESEVSDIESRIAALRAAGLTVKPSGKPRRKSNLPIFLPRVAGKLGKRPEDPNADPSSEAKAMAVPYLLRRKFSNSLKSQGKDDDSFDRKSVYRGSLTQRNPNARKGMASHTFASPSQ

SEQ ID NO: 98983 - protein, 150 aa, Homo sapiens
MEEVVIAGMSGKLPESENLQEFWDNLIGGVDMVTDDDRRWKAGLYGLPRRSGKLKDLSRFDASFFGVHPKQAHTMDPQLRLLLEVTYEAIVDGGINPDSLRGTHTGVWVGVSGSETSEALSRDPETLVGYSMVGCQRAMMANRLSFFFDF

SEQ ID NO: 98984 - protein, 172 aa, Homo sapiens
MKETCQLEIQVDNEQLNLEDEDIESIDATKLSRFIEINSLHMVTEYNPVTVIGLFNSVIQIHLLLIMNKASPEYEENMHRYQKAAKLFQGKILFILVDSGMKENGKVISFFKLKESQLPALAIYQTLDDEWDTLPTAEVSVEHVQNFCDGFLSGKLLKENRESEGKTPKVEL

SEQ ID NO: 98985 - protein, 106 aa, Homo sapiens
MEELDALLEELERSTLQDSDEYSNPAPLPLDQHSRKETNLDETSEILSIQDNTSPLPAQLVYTTNIQELNVYSEAQEPKESPPPSKTSAAAQLDELMAHLTEMQAK

SEQ ID NO: 98986 - protein, 468 aa, Homo sapiens
  MOD_RES (1)..(1): Any amino acid
XLYGVCVRDVENIMVEEFVEGGPLDLFMHRKSDVLTTPWKFKVAKQLASALSYLEDKDLVHGNVCTKNLLLAREGIDSECGPFIKLSDPGIPITVLSRQECIERIPWIAPECVEDSKNLSVAADKWSFGTTLWEICYNGEIPLKDKTLIEKERFYESRCRPVTPSYPDIVSEKKPATEVDPTHFEKRFLKRIRDLGEGHFGKVELCRYDPEGDNTGEQVAVKSLKPESGGNHIADLKKEIEILRNLYHENIVKYKGICTEDGGNGIKLIMEFLPSGSLKEYLPKNKNKINLKQQLKYAVQICKGMDYLGSRQYVHRDLAARNVLVESEHQVKIGDFGLTKAIETDKEYYTVKDDRDSPVFWYAPECLMQSKFYIASDVWSFGVTLHELLTYCDSDSSPMALFLKMIGPTHGQMTVTRLVNTLKEGKRLPCPPNCPDEVYQLMRKCWEFQPSNRTSFQNLIEGFEALLK

SEQ ID NO: 98987 - protein, 59 aa, Homo sapiens
MKHYEQRDDSSRNQSSLWHSSDSSLLKGGDSGRKDKGEAVFLGQGGAPRHHCGDQEPLH

SEQ ID NO: 98988 - protein, 61 aa, Homo sapiens
LKEEAQKRRERIDEIKRKKLEELSSLVTRTRGSTMAAFPICSRGSALQPQTQASTMPPSTS

SEQ ID NO: 98989 - protein, 857 aa, Homo sapiens
MKMKIQTSFYELPTDSHASLRDSLLTHIQNLKDLSPVIVTQLALAIADLALQMPSWKGCVQTLVEKYSNDVTSLPFLLEILTVLPEEVHSRSLRIGANRRTEIIEDLAFYSSTVVSLLMTCVEKAGTDEKMLMKVFRCLGSWFNLGVLDSNFMANNKLLALLFEVLQQDKTSSNLHEAASDCVCSALYAIENVETNLPLAMQLFQGVLTLETAYHMAVAREDLDKVLNYCRIFTELCETFLEKIVCTPGQGLGDLRTLELLLICAGHPQYEVVEISFNFWYRLGEHLYKTNDEVIHGIFKAYIQRLLHALARHCQLEPDHEGVPEETDDFGEFRMRVSDLVKDLIFLIGSMECFAQLYSTLKEGNPPWEVTEAVLFIMAAIAKSVDPENNPTLVEVLEGVVRLPETVHTAVRYTSIELVGEMSEVVDRNPQFLDPVLGYLMKGLCEKPLASAAAKAIHNICSVCRDHMAQHFNGLLEIARSLDSFLLSPEAAVGLLKGTALVLARLPLDKITECLSELCSVQVMALKKLLSQEPSNGISSDPTVFLDRLAVIFRHTNPIVENGQTHPCQKVIQEIWPVLSETLNKHRADNRIVERCCRCLRFAVRCVGKGSAALLQPLVTQMVNVYHVHQHSCFLYLGSILVDEYGMEEGCRQGLLDMLQALCIPTFQLLEQQNGLQNHPDTVDDLFRLATRFIQRSPVTLLRSQVVIPILQWAIASTTLDHRDANCSVMRFLRDLIHTGVANDHEEDFELRKELIGQVMNQLGQQLVSQLLHTCCFCLPPYTLPDVAEVLWEIMQVDRPTFCRWLENSLKGLPKETTVGAVTVTHKQLTDFHKQVTSAEECKQVCWALRDFTRLFR

SEQ ID NO: 98990 - protein, 152 aa, Homo sapiens
MDTNLNGRGLETWSSWGLRCMQCKTNGDCRVEECALGQDLCRTTIVRLWEEGEELELVEKSCTHSEKTNRTLSYRTGLKITSLTEVVCGLDLCNQGNSGRAVTYSRSRYLECISCGSSDMSCERGRHQSLQCRSPEEQCLDVVTHWIQEGEE

SEQ ID NO: 98991 - protein, 72 aa, Homo sapiens
MRRDVRILLLGEAQVGKTSLILSLVGEEFPEEPSRRTRSCGRRSTRQTWCVWCMTSLRRPPLRRFELSGSHW

SEQ ID NO: 98992 - protein, 58 aa, Homo sapiens
MRETFRNLASVGKQWEDQNIEDPFKIPRRNISHIPERLCESKEGGQGEETFSQIPDGI

SEQ ID NO: 98993 - protein, 113 aa, Homo sapiens
MEAKTLGTVTPRKPVLSVSARKIKDNAADWHNLILKWETLNDAGFTTANNIANLKISLLNKDKIELDSSSPASKENEEKVCLEYNEELEKLCEELQATLDGLRMVSRPGLCLS

SEQ ID NO: 98994 - protein, 459 aa, Homo sapiens
MTSPAKFKKDKEIIAEYDTQVKEIRAQLTEQMKCLDQQCELRVQLLQDLQDFFRKKAEIEMDYSRNLEKLAERFLAKTCSTKDQQFKKDQNVLSPVNCWNLLLNQVKRESRDHTTLSDIYLNNIIPRFVQVSEDSGRLFKKSKEVGQQLQDDLMKVLNELYSVMKTYHMYNADSISAQSKLKEAEKQEEKQIGKSVKQEDRQTPRSPDSTANVRIEEKHVRRSSVKKIEKMKEKRQAKYTENKLKAIKARNEYLLALEATNASVFKYYIHDLSDLIDQCCDLGYHASLNRALRTFLSAELNLEQSKHEGLDAIENAVENLDATSDKQRLMEMYNNVFCPPMKFEFQPHMGDMASQLCAQQPVQSELLQRCQQLQSRLSTLKIENEEVKKTMEATLQTIQDIVTVEDFDVSDCFQYSNSMESVKSTVSETFMSKPSIAKRRANQQETEQFYFTVRECYGF

SEQ ID NO: 98995 - protein, 77 aa, Homo sapiens
  MOD_RES (1)..(1): Any amino acid
XYVKDRYFVEETVEVIRNNGARLQCRILEVLPPSHQNGFANGHVNSVDGETIIISDSDDSETQSCSFQNGFPLLTAK

SEQ ID NO: 98996 - protein, 98 aa, Homo sapiens
MSRVFLIWAVTHSVKEVQSEDSVLLFVIAWTITEIIRYSFYTFSLLNHLPYLIKWARYTLFIVLYPMGVSGELLTIYAALPFVRQAGLYSISLPNKYN

SEQ ID NO: 98997 - protein, 161 aa, Homo sapiens
MSQAPGAQPSPPTVYHERQRLELCAVHALNNVLQQQLFSQEAADEICKRLAPDSRLNPHRSLLGTGNYDVNVIMAALQGLGLAAVWWDRRRPLSQLALPQVLGLILNLPSPVSLGLLSLPLRRRHWVALRQVDGVYYNLDSKLRAPEALGDEDGVRAFLAA

SEQ ID NO: 98998 - protein, 61 aa, Homo sapiens
MGKLVALVLLGVGLSLVGEMFLAFRERVNASREVEPVEPENCHLIEELGIKISRHAKLCAR

SEQ ID NO: 98999 - protein, 248 aa, Homo sapiens
MGPGQPASTCVHLAPRTQLDGRSDPKVLQTQNQLQFNRNVPTHSSNLAIRYSCPHAIRIEKLKHSYNESYHCKDADCRVGPDLGSSVSFSVISQERLSYAVHLARRDVKRRQFEKHIKEHHLRSQPQSSQKCGHTKYKIPDHRVERKESKSQAACQCSHQPSKVEISSSGAKVYLYSSHPGQSDLTVPNSPPTHDPGLQPHPRIGDHKNISEQKSLLEVQRLQKELSSCIHKIEEVTKKGKRNPGRIG

SEQ ID NO: 99000 - protein, 177 aa, Homo sapiens
  MOD_RES (1)..(1): Any amino acid
XAPASQEPLPIAGPATAPAPRPLGSIQRPNSFLFRSSSQSGSGPSSPDSVLRPRRYPQVPDEKDLMTQLRQVLESRLQRPLPEDLAEALASGVILCQLANQLRPRSVPFIHVPSPAVPKLSALKARKNVESFLEACRKMGVPEESLCQPHHILEEEGAPGRGLPYIAAVVHALLDRP

SEQ ID NO: 99001 - protein, 1122 aa, Homo sapiens
MSLQEMFRFPMGLLLGSVLLVASAPATLEPPGCSNKEQQVTVSHTYKIDVPKSALVQVDADPQPLSDDGASLLALGEAREEQNIIFRHNIRLQTPQKDCELAGSVQDLLARVKKLEEEMVEMKEQCSAQRCCQGVTDLSRHCSGHGTFSLETCSCHCEEGREGPACERLACPGACSGHGRCVDGRCLCHEPYVGADCGYPACPENCSGHGECVRGVCQCHEDFMSEDCSEKRCPGDCSGHGFCDTGECYCEEGFTGLDCAQVVTPQGLQLLKNTEDSLLVSWEPSSQVDHYLLSYYPLGKELSGKQIQVPKEQHSYEILGLLPGTKYIVTLRNVKNEVSSSPQHLLATTDLAVLGTAWVTDETENSLDVEWENPSTEVDYYKLRYGPMTGQEVAEVTVPKSSDPKSRYDITGLHPGTEYKITVVPMRGELEGKPILLNGRTEIDSPTNVVTDRVTEDTATVSWDPVQAVIDKYVVRYTSADGDTKEMAVHKDESSTVLTGLKPGEAYKVYVWAERGNQGSKKADTNALTEIDSPANLVTDRVTENTATISWDPVQATIDRYVVRYTSAKDGETREVPVGKEQSSTVLTGLRPGVEYTVHVWAQKGAQESKKADTKAQTDIDSPQNLVTDWVTENTATVSWDPVQATIDRYVVHYTSANGETREVPVGKEQSSTVLTGLRPGMEYTVHVWAQKGNQESKKADTKAQTEIDGPKNLVTDWVTENMATVSWDPVQATIDKYMVRYTSADGETREVPVGKEHSSTVLTGLRPGMEYMVHVWAQKGAQESKKADTKAQTELDPPRNLRPSAVTQSGGILTWTPPSAQIHGYILTYQFPDGTVKEMQLGREDQRFALQGLEQGATYPVSLVAFKGGRRSRNVSTTLSTVGARFPHPSDCSQVQQNSNAASGLYTIYLHGDASRPLQVYCDMETDGGGWIVFQRRNTGQLDFFKRWRSYVEGFGDPMKEFWLGLDKLHNLTTGTPARYEVRVDLQTANESAYAIYDFFQVASSKERYKLTVGKYRGTAGDALTYHNGWKFTTFDRDNDIALSNCALTHHGGWWYKNCHLANPNGRYGETKHSEGVNWEPWKGHEFSIPYVELKIRPHGYSREPVLGRKKRTLRGRLRTF

SEQ ID NO: 99002 - protein, 28 aa, Homo sapiens
MAWIKRKFGERPPPKRLTREAMRNYLKE

SEQ ID NO: 99003 - protein, 127 aa, Homo sapiens
MDLSGVKKKSLLGVKENNKKSSTRAPSPTKRKDRSDEKSKDRSKDKGATKESSEKDRGRDKTRKRRSASSGSSSTRSRSSSTSSSGSSTSTGSSSGSSSSSASSRSGSSSTSRSSSSSSSSGSPSPS

SEQ ID NO: 99004 - protein, 228 aa, Homo sapiens
MFYAHFVLSKRGPLAKIWLAAHWDKKLTKAHVFECNLESSVESIISPKVKMALRTSGHLLLGVVRIYHRKAKYLLADCNEAFIKIKMAFRPGVVDLPEENREAAYNAITLPEEFHDFDQPLPDLDDIDVAQQFSLNQSRVEEITMREEVGNISILQENDFGDFGMDDREIMREGSAFEDDDMLVSTTTSNLLLESEQSTSNLNEKINHLEYEDQYKDDNFGEGNDGGI

SEQ ID NO: 99005 - protein, 305 aa, Homo sapiens
MLKNSRVTFPQHLLPILFLLYLLMFLFTLLGNLLIMATIWIEHRLHTPMYLFLCTLSVSEILFTVAITPRMLADLLSTHHSITFVACANQMFFSFMFGFTHSFLLLVMGYDRYVAICHPLRYNVLMSPRDCAHLVACTWAGGSVMGMMVTTIVFHLTFCGSNVIHHFFCHVLSLLKLACENKTSSVIMGVMLVCVTALIGCLFLIILSYVFIVAAILRIPSAEGRHKTFSTCVSHLTVVVTHYSFASFIYLKPKGLHSMYSDALMATTYTVFTPFLSPIIFSLRNKELKNAINKNFYRKFCPPSS

SEQ ID NO: 99006 - protein, 252 aa, Homo sapiens
GRRNGQAPNEKMKQVLKKTIEEAKAIISKKQVEAGVCVTMEMVKDALDQLRGAVMIVYPMGLPPYDPIRMEFENKEDLSGTQAGLNVIKEAEAQLWWAAKELRRTKKLSDYVGKNEKTKIIAKIQQPLQQQIIRLHQELGRQKSLWADVHGKLRSHIDALREQNMELREKLRALQLQRWKARKKSAASPHAGQESHTLALEPAFGKISPLSADEETIPKYAGHKNQSATLLGQRSSSNNSAPPKVTLCAYHL

SEQ ID NO: 99007 - protein, 180 aa, Homo sapiens
MGQQISDQTQLVINKLPEKVAKHVTLVRESGSLTYEEFLGRVAELNDVTAKVASGQEKHLLFEVQPGSDSSAFWKVVVRVVCTKINKSSGIVEASRIMNLYQFIQLYKDITSQAAGVLAQSSTSEEPDENSSSVTSCQASLWMGRVKQLTDEEECCICMDGRADLILPCAHSFCQKCIDK

SEQ ID NO: 99008 - protein, 91 aa, Homo sapiens
  MOD_RES (1)..(1): Any amino acid
XEKATKVQDIKNNLKEAIETIVAAMSNLVPPVELANPENQFRVDYILSVMNVPDFDFPPEFYEHAKALWEDEGVRACYERSNEYQLIDCAQ

SEQ ID NO: 99009 - protein, 270 aa, Homo sapiens
MAETLFWTPLLVVLLAGLGDTEAQQTTLHPLVGRVFVHTLDHETFLSLPEHVAVPPAVHITYHAHLQGHPDLPRWLRYTQRSPHHPGFLYGSATPEDRGLQVIEVTAYNRDSFDTTRQRLVLEIGDPEGPLLPYQAEFLVRSHDAEEVLPSTPASRFLSALGGLWEPGELQLLNVTSALDRGGRVPLPIEGRKEGVYIKVGSASPFSTCLKMVASPDSHARCAQGQPPLLSCYDTLAPHFRVDWCNVTLSWPLPCSWGPLCPASHFLRQP

SEQ ID NO: 99010 - protein, 324 aa, Homo sapiens
MDRFVWTSGLLEINETLVIQQRGVRIYDGEEKIKFDAGTLLLSTHRLIWRDQKNHECCMAILLSQIVFIEEQAAGIGKSAKIVVHLHPAPPNKEPGPFQSSKNSYIKLSFKEHGQIEFYRRLSEEMTQRRWENMPVSQSLQTNRGPQPGRIRAVGIVGIERKLEEKRKETDKNISEAFEDLSKLMIKAKEMVELSKSIANKIKDKQGDITEDETIRFKSYLLSMGIANPVTRETYGSGTQYHMQLAKQLAGILQVPLEERGGIMSLTEVYCLVNRARGMELLSPEDLVNACKMLEALKLPLRFKKVARWLGVVAHTCNPSTLGG

SEQ ID NO: 99011 - protein, 163 aa, Homo sapiens
MADTDPRVRVEKLVKYLDPNDLGRINFKDFCRGVFAMKGCEELLKDVLSVESAGTLPCAPEIPDCVEQGSEVTGPTFADGELIPREPGFFPEDEEEAMTLAPPEGPQELYTDSPMESTQSLEGSVGSPAEKDGGLGGLFLPEDKSLVHTPSMTTSDLSTHSTT

SEQ ID NO: 99012 - protein, 594 aa, Homo sapiens
MLDCSDYVLDSRMNNPSETSKPSMESGDGNTGTQTNGLDFQKQPVPVGGAISTAQAQAFLGHLHQVQLAGTSLQAAAQSLNVQSKSNEESGDSQQPSQPSQQPSVQAAIPQTQLMLAGGQITGLTLTPAQQQLLLQQAQAQAQLLAAAVQQHSASQQHSAAGATISASAATPMTQIPLSQPIQIAQDLQQLQQLQQQNLNLQQFVLVHPTTNLQPAQFIISQTPQGQQGLLQAQNLLTQLPQQSQANLLQSQPSITLTSQGDVGLAMGKLYGNDFSQTTISRFEALNLSFKNMCKLKPLLEKWLNDAENLSSDSSLSSPSALNSPGIEGLSRRRKKRTSIETNIRVALEKSFLENQKPTSEEITMIADQLNMEKEVIRVWFCNRRQKEKRINPPSSGGTSSSPIKAIFPSPTSLVATTPSLVTSSAATTLTVSPVLPLTSAAVTNLSVTGTSDTTSNNTATVISTAPPASSAVTSPSLSPSPSASASTSEASSASETSTTQTTSTPLSSPLGTSQVMVTASGLQTAAAAALQGAAQLPANASLAAMAAAAGLNPSLMAPSQFAAGGALLSLNPGTLSGALSPALMSNSTLATIQ

SEQ ID NO: 99013 - protein, 232 aa, Homo sapiens
MPGTVGTAGHLYHPRQWRCRLRGPGEGPGSGRSGGRAATAPRHRSPNRGGRAGPRGPHEGWVPRARGEVIAHSEYQKSKRISIFLSMQDEIETEEIIKDIFQRGKICFIPRYRFQSNHMDMVRIESPEEISLLPKTSWNIPQPGEGDVREEALSTGGLDLIFMPGLGFDKHGNRLGRGKGYYDAYLKRCLQHQEVKPYTLALAFKEQICLQVPVNENDMKVDEVLYEDSSTA

SEQ ID NO: 99014 - protein, 128 aa, Homo sapiens
MLQTLYDYFWWERLWLPVNLTWADLEDRDGRVYAKASDLYITLPLALLFLIVRYFFELYVATPLAALLNIKEKTRLRAPPNATLEHFYLTSGKQPKQVEVELLSRQSGLSGRQVERWFRRRRNQDRPS

SEQ ID NO: 99015 - protein, 54 aa, Homo sapiens
MTHSLVCPETVSRVSSVLNRNTRQFGKKHLFDQDEETCWNSDQVHRALRLSTRL

SEQ ID NO: 99016 - protein, 256 aa, Homo sapiens
  MOD_RES (1)..(1): Any amino acid
XMAGQSPVLRIIVENLFYPVTLDVLHQIFSKFGTVLKIITFTKNNQFQALLQYADPVSAQHAKLSLDGQNIYNACCTLRIDFSKLTSLNVKYNNDKSRDYTRPDLPSGDSQPSLDQTMAAAFGAPGIISASPYAGAGFPPTFAIPQAAGLSVPNVHGALAPLAIPSAAAAAAAAGRIAIPGLAGAGNSVLLVSNLNPERVKILFNKKENALVQMADGNQAQLAMSHLNGHKLHGKPIRITLSKHQNVQLPREGQED

SEQ ID NO: 99017 - protein, 345 aa, Homo sapiens
MAQALEKLFMQKLSQMPQEEQVVGVKERIKKGTQQNIAVSSAKEKSSPSATEKVFKQQEIPSVFPKTSISPLNVVQGASVNSSSQTAAQVTKGVKRKADTTTPATSAVKASSEFSPTFTEKSVALPPIKENMPKNVLPDSQQQYNVVKTVKVTEQLRHCSEILKEMLAKKHFSYAWPFYNPVDVNALGLHNYYDVVKNPMDLGTIKEKMDNQEYKDAYKFAADVRLMFMNCYKYNPPDHEVVTMARMLQDVFETHFSKIPIEPVESMPLCYIKTDITETTGRENTNEASSEGNSSDDSEDERVKRLAKLQEQLKAVHQQLQVLSQVPFRKLNKKKEKSKKEKKKE

SEQ ID NO: 99018 - protein, 37 aa, Homo sapiens
MHVNGKVALVTGAAQGIGRAFAEALLLKGAKTLLEKL

SEQ ID NO: 99019 - protein, 253 aa, Homo sapiens
MDEEPERTKRWEGGYERTWEILKEDESGSLKATIEDILFKAKRKRVFEHHGQVRLGMMRHLYVVVDGSRTMEDQDLKPNRLTCTLKIGIIVTKSKRAEKLTELSGNPRKHITSLKEAVDMTCHGEPSLYNSLSMAMQTLKHMPGHTSREVLIIFSSLTTCDPSNIYDLIKTLKAAKIRVSVIGLSAEVRVCTVLARETGGTYHVILDESHYKELLTHHLSPPPASSSSECSLIRMGFPQHTIASLSDQDAKPS

SEQ ID NO: 99020 - protein, 55 aa, Homo sapiens
MECPHLSSSVCIAPDSAKFPNGSPSSWCCSVCRSNKSPWVCLTCSSVHCGRIWGT

SEQ ID NO: 99021 - protein, 107 aa, Homo sapiens
MADNSSDECEEENNKEKKKTSQLTPQRGFSENEDDDDDDDDSSETDSDSDDDDEEHGAPLEGAYDPADYEHLPVSAEIKELFQYISRYTPQLIDLDHKLKPFIPDFI

SEQ ID NO: 99022 - protein, 37 aa, Homo sapiens
MAEGNTLISVDYEIFGKVQGVFFRKHTQVCGLQALGW

SEQ ID NO: 99023 - protein, 648 aa, Homo sapiens
MLQNVTPHNKLPGEGNAGLLGLGPEAAAPGKRIRKPSLLYEGFESPTMASVPALQLTPANPPPPEVSNPKKPGRVTNQLQYLHKVVMKALWKHQFAWPFRQPVDAVKLGLPDYHKIIKQPMDMGTIKRRLENNYYWAASECMQDFNTMFTNCYIYNKPTDDIVLMAQTLEKIFLQKVASMPQEEQELVVTIPKNSHKKGAKLAALQGSVTSAHQVPAVSSVSHTALYTPPPEIPTTVLNIPHPSVISSPLLKSLHSAGPPLLAVTAAPPAQPLAKKKGVKRKADTTTPTPTAILAPGSPASPPGSLEPKAARLPPMRRESGRPIKPPRKDLPDSQQQHQSSKKGKLSEQLKHCNGILKELLSKKHAAYAWPFYKPVDASALGLHDYHDIIKHPMDLSTVKRKMENRDYRDAQEFAADVRLMFSNCYKYNPPDHDVVAMARKLQDVFEFRYAKMPDEPLEPGPLPVSTAMPPGLAKSSSESSSEESSSESSSEEEEEEDEEDEEEEESESSDSEEERAHRLAELQEQLRAVHEQLAALSQGPISKPKRKREKKEKKKKRKAEKHRGRAGADEDDKGPRAPRPPQPKKSKKASGSGGGSAALGPSGFGPSGGSGTKLQAGVQWRDLGLLQPPLLGFKRFSCLSLPSSQDY

SEQ ID NO: 99024 - protein, 586 aa, Homo sapiens
  MOD_RES (1)..(1): Any amino acid
XSMSRSQVALLGLSLLLMLLLYVGLPGPPEQTSCLWGDPNVTVLAGLTPGNSPIFYREVLPLNQAHRVEVVLLHGKAFNSHTWEQLGTLQLLSQRGYRAVALDLPGFGNSAPSKEASTEAGRAALLERALRDLEVQNAVLVSPSLSGHYALPFLMRGHHQLHGFVPIAPTSTQNYTQEQFWAVKLTTRSAMTSKGPEEEHPSVTLFRQYLRIRTVQPKPDYGAAVAFFEETARQLGLGCQKVEVAPGYVVTVLTWPGTNPTLSSILLNSHTDVVPVFKEHWSHDPFEAFKDSEGYIYARGAQDMKCVSIQYLEAVRRLKVEGHRFPRTIHMTFVPDEEVGGHQGMELFVQRPEFHALRAGFALDEGIANPTDAFTVFYSERSPWWVRVTSTGRPGHASRFMEDTAAEKLHKVVNSILAFREKEWQRLQSNPHLKEGSVTSVNLTKLEGGVAYNVIPATMSASFDFRVAPDVDFKAFEEQLQSWCQAAGEGVTLEFAQKWMHPQVTPTDDSNPWWAAFSRVCKDMNLTLEPEIMPAATDNRYIRAVGVPALGFSPMNRTPVLLHDHDERLHEAVFLRGVDIYTRLLP

SEQ ID NO: 99025 - protein, 1447 aa, Homo sapiens
MPKNAAVSNLDIESKLSVYYRAPWHQQRNIFLPATRPPCVEELHRHARQSLQALRREHRSRSDRREQRAAAPLSIAAPPLPAYPPAHSQRRREFKDRHFLTSHPPEDEDTDVMLGQRPKNPIHNIPSTLDKQTNWSKALPLPTPEEKMKQDAQVISSCIIPINVTGVGFDREASIRCSLVHSQSVLQRRRKLRRRKTISGIPRRVQQEIDSDESPVARERNVIVHTNPDPSNTVNRISGTRDSECQTEDILIAAPSRRRIRAQRGQSIAASLSHSAGNISALADKGDTMFTPAVSSRTRSRSLPREGNRGGDAEPKVGAKPSAYEEGESFVGDHERTPNDFSEAPSSPSAQDHQPTLGLACSQHLHSPQHKLSERGRSRLSRMAADSGSCDISSNSDTFGSPIHCISTAGVLLSSHMDQKDDHQSSSGNWSGSSSTCPSQTSETIPPAASPPLTGSSHCDSELSLNTAPHANEDASVFVTEQYNDHLDKVRGHRANSFTSTVADLLDDPNNSNTSDSEWNYLHHHHDASCRQDFSPERPKADSLGCPSFTSMATYDSFLEKSPSDKADTSSHFSVDTEGYYTSMHFDCGLKGNKSYVCHYAALGPENGQGVGASPGLPDCAWQDYLDHKRQGRPSISFRKPKAKPTPPKRSSSLRKSDGNADISEKKEPKISSGQHLPHSSREMKLPLDFANTPSRMENANLPTKQEPSWINQSEQGIKEPQLDASDIPPFKDEVAESTHYADLWLLNDLKTNDPYRSLSNSSTATGTTVIECIKSPESSESQTSQSESRATTPSLPSVDNEFKLASPEKLAGLASPSSGYSSQSETPTSSFPTAFFSGPLSPGGSKRKPKVPERKSSLQQPSLKDGTISLSKDLELPIIPPTHLDLSALHNVLNKPFHHRHPLHVFTHNKQNTVGETLRSNPPPSLAITPTILKSVNLRSINKSEEVKQKEENNTDLPYLEESTLTTAALSPSKIRPHTANKSVSRQYSTEDTILSFLDSSAVEMGPDKLHLEKNSTFDVKNRCDPETITSAGSSLLDSNVTKDQVRTETEPIPENTPTKNCAFPTEGFQRVSAARPNDLDGKIIQYGPGPDETLEQVQKAPSAGLEEVAQPESVDVITSQSDSPTRATDVSNQFKHQFVMSRHHDKVPGTISYESEITSVNSFPEKCSKQENIASGISAKSASDNSKAEETQGNVDEASLKESSPSDDSIISPLSEDSQAEAEGVFVSPNKPRTTEDLFAVIHRSKRKVLGRKDSGDMSVRSKSRAPLSSSSSSASSITSPSSNVTTPNSQRSPGLIYRNAKKSNTSNEEFKLLLLKKGSRSDSSYRMSATEILKSPILPKPPGELTAESPQSTDDAHQGSQGAEALSPLSPCSPRVNAEGFSSKSFATSASARVGRSRAPPAASSSRYSVRCRLYNTPMQAISEGETENSDGSPHDDRSSQSST

SEQ ID NO: 99026 - protein, 324 aa, Homo sapiens
MGWGLLAGQSTQSWPLMFLAPQQARSLLQRVRRANTFLEEVRKGNLERECVEETCSYEEAFEALESSTATDVFWAKYTACETARTPRDKLAACLEGNCAEGLGTNYRGHVNITRSGIECQLWRSRYPHKPEINSTTHPGADLQENFCRNPDSSTTGPWCYTTDPTVRRQECSIPVCGQDQVTVAMTPRSEGSSVNLSPPLEQCVPDRGQQYQGRLAVTTHGLPCLAWASAQAKALSKHQDFNSAVQLVENFCRNPDGDEEGVWCYVAGKPGDFGYCDLNYCEEAVEEETGDGLDEDSDRAIEGRTATSEYQTFFNPRTFGSGEA

SEQ ID NO: 99027 - protein, 409 aa, Homo sapiens
MQPPPSLCGRALVALVLACGLSRIWGEERGFPPDRATPLLQTAEIMTPPTKTLWPKGSNASLARSLAPAEVPKGDRTAGSPPRTISPPPCQGPIEIKETFKYINTVVSCLVFVLGIIGNSTLLRIIYKNKCMRNGPNILIASLALGDLLHIVIDIPINVYKLLAEDWPFGAEMCKLVPFIQKASVGITVLSLCALSIDRYRAVASWSRIKGIGVPKWTAVEIVLIWVVSVVLAVPEAIGFDIITMDYKGSYLRICLLHPVQKTAFMQFYKTAKDWWLFSFYFCLPLAITAFFYTLMTCEMLRKKSGMQIALNDHLKQRREVAKTVFCLVLVFALCWLPLHLSRILKLTLYNQNDPNRCELLSFLLVLDYIGINMASLNSCINPIALYLVSKRFKNCFKVRDYPKIKSSL

SEQ ID NO: 99028 - protein, 202 aa, Homo sapiens
MEEEVRLKKRKRRRNVDKDPAKEDVEKAKKRRGRPPAEKLSPNPPKLTKQMNAIIDTVINYKDSSGRQLSEVFIQLPSRKELPEYYELIRKPVDFKKIKERIRNHKYRSLGDLEKDVMLLCHNAQTFNLEGSQIYEDSIVLQSVFKSARQKIAKEEESEDESNEEEEEEDEEESESEAKSVKVKIKLNKKDDKGRDKGKGKK

SEQ ID NO: 99029 - protein, 244 aa, Homo sapiens
MWELRSIAFSRAVFAEFLATLLFVFFGLGSALNWPQALPSVLQIAMAFGLGIGTLVQALGHISGAHINPAVTVACLVGCHVSVLRAAFYVAAQLLGAVAGAALLHEITPADIRGDLAVNALSNSTTAGQAVTVELFLTLQLVLCIFASTDERRGENPGTPALSIGFSVALGHLLGVGHGHGFQPPWRNRHTDHSRDRHRDPKRDTYTELSRGTDTPEIHYTGCSMNPARSLAPAVVTGKFDDHW

SEQ ID NO: 99030 - protein, 1026 aa, Homo sapiens
MFPLSFWWYCEGKELENSPDIHIVQAGNLHSLTIAEAFEEDTGRYSCFASNIYGTDSTSAEIYIEGVSSSDSEGDPNKEEMNRIQKPNEVSSPPTTSAVIPPAVPQAQHLVAQPRVATIQQCQSPTNYLQGLDGKPIIAAPVFTKMLQNLSASEGQLVVFECRVKGAPSPKVEWYREGTLIEDSPDFRILQKKPRSMAEPEEICTLVIAEVFAEDSGCFTCTASNKYGTVSSIAQLHVRGNEDLSNNGSLHSANSTTNLAAIEPQPSPPHSEPPSVEQPPKPKLEGVLVNHNEPRSSSRIGLRVHFNLPEDDKGSEASSEAGVVTTRQTRPDSFQERFNGQATKTPEPSSPVKEPPPVLAKPKLDSTQLQQLHNQVLLEQHQLQNPPPSSPKEFPFSMTVLNSNAPPAVTTSSKQVKAPSSQTFSLARPKYFFPSTNTTAATVAPSSSPVFTLSSTPQTIQRTVSKESLLVSHPSVQTKSPGGLSIQNEPLPPGPTEPTPPPFTFSIPSGNQFQPRCVSPIPVSPTSRIQNPVAFLSSVLPSLPAIPPTNAMGLPRSAPSMPSQGLAKKNTKSPQPVNDDNIRETKNAVIRDLGKKITFSDVRPNQQEYKISSFEQRLMNEIEFRLERTPVDESDDEIQHDEIPTGKCIAPIFDKRLKHFRVTEGSPVTFTCKIVGIPVPKVYWFKDGKQISKRNEHCKMRREGDGTCSLHIESTTSDDDGNYTIMAANPQGRISCSGHLMVQSLPIRSRLTSAGQSHRGRSRVQERDKEPLQERFFRPHFLQAPGDMVAHEGRLCRLDCKVSGLPPPELTWLLNGQPVLPDASHKMLVRETGVHSLLIDPLTQRDAGTYKCIATNKTGQNSFSLELSVVAKEVKKAPVILEKLQNCGVPEGHPVRLECRVIGMPPPVFYWKKDNETIPCTRERISMHQDTTGYACLLIQPAKKSDAGWYTLSAKNEAGIVSCTARLDIYAQWHHQIPPPMSVRPSGSRYGSLTSKGLDIFSAFSSMESTMVYSCSSRSVVESDEL

SEQ ID NO: 99031 - protein, 52 aa, Homo sapiens
MAAASVSAASGSHLSTRGWALDYSSVVGHGICTVTQPVSFSRKKREKIVQQI

SEQ ID NO: 99032 - protein, 289 aa, Homo sapiens
DYLVEAMEILELYCDLLLARFGLIQSMKELDSGLAESVSTLIWAAPRLQSEVAELKIVADQLCAKYSKEYGKLCRTNQIGTVNDRLMHKLSVEAPPKILVERYLIEIAKNYNVPYEPDSVVMAEAPPGVETDLIDVGFTDDVKKGGPGRGGSGGFTAPVGGPDGTVPMPMPMPMPMPSANTPFSYPLPKGPSDFNGLPMGTYQAFPNIHPPQIPATPPSYESVSPGPKPEASAKLPSRPADNYDNFVLPELPSVPDTLPTASAGASTSASEDIDFDDLSRRFEELKKKT

SEQ ID NO: 99033 - protein, 302 aa, Homo sapiens
MPEAPPLLLAAVLLGLVLLVVLLLLLRHWGWGLCLIGWNEFILQPIHNLLMGDTKEQRILNHVLQHAEPGNAQSVLEAIDTYCEQKEWAMNVGDKKGKIVDAVIQEHQPSVLLELGAYCGYSAVRMARLLSPGARLITIEINPDCAAITQRMVDFAGVKDKVTLVVGASQDIIPQLKKKYDVDTLDMVFLDHWKDRYLPDTLLLEKWGLPMLPRLVSNSWPQAILLPQPPKVLGVQECGLLRKGTVLLADNVICPGAPDFLAHVRGSSCFECTHYQSFLEYREVVDGLEKAIYKGPGSEAGP

SEQ ID NO: 99034 - protein, 169 aa, Homo sapiens
MFSGTHVERDFVEAPSQMLENWVWEQEPLLRMSRHYRTGSAVPRELLEKLIESRQANTGLFNLRQIVLAKVDQALHTQTDADPAEEYARLCQEILGVPATPGTNMPATFGHLAGGYDAQYYGYLWSEVYSMDMFHTRFKQEGVLNSKVGMDYRSCILRPGGSEDASAML

SEQ ID NO: 99035 - protein, 43 aa, Homo sapiens
DDGSWEVIEGYRAQHSQHRTPCKGEAEINTDSSVHYQVGIVNM

SEQ ID NO: 99036 - protein, 574 aa, Homo sapiens
MWPSLLLLLLLPGPPPVAGLEDAAFPHLGESLQPLPRACPLRCSCPRVDTVDCDGLDLRVFPDNITRAAQHLSLQNNQLQELPYNELSRLSGLRTLNLHNNLISSEGLPDEAFESLTQLQHLCVAHNKLSVAPQFLPRSLRVADLAANQVMEIFPLTFGEKPALRSVYLHNNQLSNAGLPPDAFRGSEAIATLSLSNNQLSYLPPSLPPSLERLHLQNNLISKVPRGALSRQTQLRELYLQHNQLTDSGLDATTFSKLHSLEYLDLSHNQLTTVPAGLPRTLAILHLGRNRIRQVEAARLHGARGLRYLLLQHNQLGSSGLPAGALRPLRGLHTLHLYGNGLDRVPPALPRRLRALVLPHNHVAALGARDLVATPGLTELNLAYNRLASARVHHRAFRRLRALRSLDLAGNQLTRLPMGLPTGLRTLQLQRNQLRMLEPEPLAGLDQLRELSLAHNRLRVGDIGPGTWHELQALQMLDLSHNELSFVPPDLPEALEELHLEGNRIGHVGPEAFLSTPRLRALFLRANRLHMTSIAAEAFLGLPNLRVVDTAGNPEQVLIRLPPTTPRGPRAGGP

SEQ ID NO: 99037 - protein, 121 aa, Homo sapiens
MSGTLEKVLCLRNNTIFKQAFSLLRFRTSGEKPIYSVGGILLSISRPYKTKPTHGIGKYKHLIKAEEISGLSATFAEIFLEIIQSSLPEGVRLSVKEHTEEDFKGRFKARPELEELLAKLK

SEQ ID NO: 99038 - protein, 84 aa, Homo sapiens
MMLGTEGGEGFVVKVRGLPWSCSADEVQRFFSDCKIQNGAQGIRFIYTREGRPSGEAFVELESEDEVKLALKKDRETMGHRYVE

SEQ ID NO: 99039 - protein, 50 aa, Homo sapiens
MTEVQAMVEFSVELNKFYNVDLFQRGFYQIRASMKIPSRIPHRVEASLLH

SEQ ID NO: 99040 - protein, 88 aa, Homo sapiens
MLLGAAPESSPGPRRGRPSSSLVPEGSGRKENQTLFPSVTSSVCVHGEPAPSRWMLHCFRRQASSSWVLKGAFGGPFEGYCISVFTRA

SEQ ID NO: 99041 - protein, 159 aa, Homo sapiens
MKMASSLAFLLLNFHVSLLLVQLLTPCSAQFSVLGPSGPILAMVGEDADLPCHLFPTMSAETMELKWVSSSLRQVVNVYADGKEVEDRQSAPYRGRTSILRDGITAGKAALRIHNVTASDSGKYLCYFQDGDFYEKALVELKVADPFFRSAQPWIAALA

SEQ ID NO: 99042 - protein, 1682 aa, Homo sapiens
MERNVLTTFSQEMSQLILNEMPKAEYSSLFNDFVESEFFLIDGDSLLITCICEISFKPGQNLHFFYLVERYLVDLISKGGQFTIVFFKDAEYAYFNFPELLSLRTALILHLQKNTTIDVRTTFSRCLSKEWGSFLEESYPYFLIVADEGLNDLQTQLFNFLIIHSWARKVNVVLSSGQESDVLCLYAYLLPSMYRHQIFSWKNKQNIKDAYTTLLNQLERFKLSALAPLFGSLKWNNITEEAHKTVSLLTQVWPEGSDIRRVFCVTSCSLSLRMYHRFLGNREPSSGQETEIQQVNSNCLTLQEMEDLCKLHCLTVVFLLHLPLSQRACARVITSHWAEDMKPLLQMKKWCEYFILRNIHTFEFWNLNLIHLSDLNDELLLKNIAFYYENENVKGLHLNLGDTIMKDYEYLWNTVSKLVRDFEVGQPFPLRTTKVCFLEKKPSPIKDSSNEMVPNLGFIPTSSFVVDKFAGDILKDLPFLKSDDPIVTSLVKQKEFDELVHWHSHKPLSDDYDRSRCQFDEKSRDPRVLRSVQKYHVFQRFYGNSLETVSSKIIVTQTIKSKKDFSGPKSKKAHETKAEIIARENKKRLFAREEQKEEQKWNALSFSIEEQLKENLHSGIKSLEDFLKSCKSSCVKLQVEMVGLTACLKAWKEHCRSEEGKTTKDLSIAVQVMKRIHSLMEKYSELLQEDDRQLIARCLKYLGFDELASSLHPAQDAENDVKVKKRNKYSVGIGPARFQLQYMGHYLIRDERKDPDPRVQDFIPDTWQRELLDVVDKNESAVIVAPTSSGKTYASYYCMEKVLKESDDGVVVYVAPTKALVNQVAATVQNRFTKNLPSGEVLCGVFTREYRHDALNCQVLITVPACFEILLLAPHRQNWVKKIRYVIFDEVHCLGGEIGAEIWEHLLVMIRCPFLALSATISNPEHLTEWLQSVKWYWKQEDKIIENNTASKRHVGRQAGFPKDYLQVKQSYKVRLVLYGERYNDLEKHVCSIKHGDIHFDHFHPCAALTTDHIERYGFPPDLTLSPRESIQLYDAMFQIWKSWPRAQELCPENFIHFNNKLVIKKMDARKYEESLKAELTSWIKNGNVEQARMVLQNLSPEADLSPENMITMFPLLVEKLRKMEKLPALFFLFKLGAVENAAESVSTFLKKKQETKRPPKADKEAHVMANKLRKVKKSIEKQKIIDEKSQKKTRNVDQSLIHEAEHDNLVKCLEKNLEIPQDCTYADQKAVDTETLQKVFGRVKFERKGEELKALAERGIGYHHSAMSFKEKQLVEILFRKGYLRVVTATGTLALGVNMPCKSVVFAQNSVYLDALNYRQMSGRAGRRGQDLMGDVYFFDIPFPKIGKLIKSNVPELRGHFPLSITLVLRLMLLASKGDDPEDAKAKVLSVLKHSLLSFKQPRVMDMLKLYFLFSLQFLVKEGYLDQEGNPMGFAGLVSHLHYHEPSNLVFVSFLVNGLFHDLCQPTRKGSKHFSQDVMEKLVLVLAHLFGRRYFPPKFQDAHFEFYQSKVFLDDLPEDFSDALDEYNMKIMEDFTTFLRIVSKLADMNQEYQLPLSKIKFTGKECEDSQLVSHLMSCKEGRVAISPFVCLSGNFDDDLLRLETPNHVTLGTIGVNRSQAPVLLSQKFDNRGRKMSLNAYALDFYKHGSLIGLVQDNRMNEGDAYYLLKDFALTIKSIRDL

SEQ ID NO: 99043 - protein, 978 aa, Homo sapiens
MNNPAIKRIGNHITKSPEDKREYRGLELANGIKVLLISDPTTDKSSAALDVHIGSLSDPPNIAGLSHFCEHMLFLGTKKYPKENEYSQFLSEHAGSSNAFTSGEHTNYYFDVSHEHLEGALDRFAQFFLCPLFDESCKDREVNAVDSEHEKNVMNDAWRLFQLEKATGNPKHPFSKFGTGNKYTLETRPNQEGIDVRQELLKFHSAYYSSNLMAVCVLGRESLDDLTNLVVKLFSEVENKNVPLPEFPEHPFQEEHLKQLYKIVPIKDIRNLYVTFPIPDLQKYYKSNPGHYLGHLIGHEGPGSLLSELKSKGWVNTLVGGQKEGARGFMFFIINVDLTEEGLLHVEDIILHMFQYIQKLRAEGPQEWVFQECKDLNAVAFRFKDKERPRGYTSKIAGILHYYPLEEVLTAEYLLEEFRPDLIEMVLDKLRPENVRVAIVSKSFEGKTDRTEEWYGTQYKQEAIPDEVIKKWQNADLNGKFKLPTKNEFIPTNFEILPLEKEATPYPALIKDTAMSKLWFKQDDKFFLPKACLNFEFFSRYIYADPLHCNMTYLFIRLLKDDLKEYTYAARLSGLSYGIASGMNAILLSVKGYNDKQPILLKKIIEKMATFEIDEKRFEIIKEAYMRSLNNFRAEQPHQHAMYYLRLLMTEVAWTKDELKEALDDVTLPRLKAFIPQLLSRLHIEALLHGNITKQAALGIMQMVEDTLIEHAHTKPLLPSQLVRYREVQLPDRGWFVYQQRNEVHNNCGIEIYYQTDMQSTSENMFLELFCQIISEPCFNTLRTKEQLGYIVFSGPRRANGIQGLRFIIQSEKPPHYLESRVEAFLITMEKSIEDMTEEAFQKHIQALAIRRLDKPKKLSAECAKYWGEIISQQYNFDRDNTEVAYLKTLTKEDIIKFYKEMLAVDAPRRHKVSVHVLAREMDSCPVVGEFPCQNDINLSQAPALPQPEVIQNMTEFKRGLPLFPLVKPHINFMAAKL

SEQ ID NO: 99044 - protein, 456 aa, Homo sapiens
MVVLNPMTLGIYLQLFFLSIVSQPTFINSVLPISAALPSLDQKKRGGHKACCLLTPPPPPLFPPPFFRGGRSPLLSPDMKNLMLELETSQSPCMQGSLGSPGPPGPQGPPGLPGKTGPKGEKGELGRPGRKGRPGPPGVPGMPGPIGWPGPEGPRGEKGDLGMMGLPGSRGPMGSKGYPGSRGEKGSRGEKGDLGPKGEKGFPGFPGMLGQKGEMGPKGEPGIAGHRGPTGRPGKRGKQGQKGDSGVMGPPGKPGPSGQPGRPGPPGPPPAGQLIMGPKGERGFPGPPGRCLCGPTMNVNNPSYGESVYGPSSPRVPVIFVVNNQEELERLNTQNAIAFRRDQRSLYFKDSLGWLPIQLTPFYPVDYTADQHGTCGDGLLQPGEECDDGNSDVGDDCIRDCHRAYCGDGHRHEGVEDCDGSDFGYLTCETYLPGSYGDLQCTQYCYIDSTPCRYFT

SEQ ID NO: 99045 - protein, 42 aa, Homo sapiens
  MOD_RES (1)..(1): Any amino acid
XASDCDHQQNSPTLERPGRKRKWTETQDSSQKKSLEPKTKGL

SEQ ID NO: 99046 - protein, 63 aa, Homo sapiens
MSEREERRFVEIPRESVRLMAESTGLELSDEVAALLAEDVCYRLREATQLSVHEAHQTPEADG

SEQ ID NO: 99047 - protein, 47 aa, Homo sapiens
MAGQRTCQRRSSRAGPGKMQEPPKSIEEFLKFQNWVLIENWNDMGNF

SEQ ID NO: 99048 - protein, 103 aa, Homo sapiens
MAAFKLDFLPEMMVDHCSLNSSPVSKKMNGTLDHPDQPDLDAIKMFVGQVPRTWSEKDLRELFEQYGAVYEINVLRDRSQNPPQSKGCCFVTFYTRKAALEAQ

SEQ ID NO: 99049 - protein, 49 aa, Homo sapiens
MSVSVHENRKSRASSGSINIYLFHKSSYADSVLTHLNLLRQQRLFTDVL

SEQ ID NO: 99050 - protein, 604 aa, Homo sapiens
MASVAWAVLKVLLLLPTQTWSPVGAGNPPDCDAPLASALPRSSFSSSSELSSSHGPGFSRLNRRDGAGGWTPLVSNKYQWLQIDLGERMEVTAVATQGGYGSSDWVTSYLLMFSDGGRNWKQYRREESIWGFPGNTNADSVVHYRLQPPFEARFLRFLPLAWNPRGRIGMRIEVYGCAYKSEVVYFDGQSALLYRLDKKPLKPIRDVISLKFKAMQSNGILLHREGQHGNHITLELIKGKLVFFLNSGNAKLPSTIAPVTLTLGSLLDDQHWHSVLIELLDTQVNFTVDKHTHHFQAKGDSSYLDLNFEISFGGIPTPGRSRAFRRKSFHGCLENLYYNGVDVTELAKKHKPQILMMGNVSFSCPQPQTVPVTFLSSRSYLALPGNSGEDKVSVTFQFRTWNRAGHLLFGELRRGSGSFVLFLKDGKLKLSLFQPGQSPRNVTAGAGLNDGQWHSVSFSAKWSHMNVVVDDDTAVQPLVAVLIDSGDTYYFGALYEQSCEAHKHRGNPSGLYYIDADGSGPLGPFLVYCNMTDAAWTVVQHGGPDAVTLRGAPSGHPRSAVSFAYAAGAGQLRSAVNLAERCEQRLALRCGTARRPDSRGLVTQ

SEQ ID NO: 99051 - protein, 470 aa, Homo sapiens
MGRCCFYTAGTLSLLLLVTSVTLLVARVFQKAVDQSIEKKIVLRNGTEAFDSWEKPPLPVYTQFYFFNVTNPEEILRGETPRVEEVGPYTYRELRNKANIQFGDNGTTISAVSNKAYVFERDQSVGDPKIDLIRTLNIPVLTVIEWSQVHFLREIIEAMLKAYQQKLFVTHTVDELLWGYKDEILSLIHVFRPDISPYFGLFYEKNGTNDGDYVFLTGEDSYLNFTKIVEWNGKTSLDWWITDKCNMINGTDGDSFHPLITKDEVLYVFPSDFCRSVYITFSDYESVQGLPAFRYKVPAEILANTSDNAGFCIPEGNCLGSGVLNVSICKNGAPIIMSFPHFYQADERFVSAIEGMHPNQEDHETFVDINPLTGIILKAAKRFQINIYVKKLDDFVETGDIRTMVFPVMYLNESVHIDKETASRLKSMINTTLIITNIPYIIMALGVFFGLVFTWLACKGQGSMDEVRTG

SEQ ID NO: 99052 - protein, 919 aa, Homo sapiens
MSYGEIEGKFLGPREEVTSEPRCKKLKSTTESYVFHNHSNADFHRIQEKTGNDWVPVTIIDVRGHSYLQENKIKTTDLHRPLHDEMPGNRPDVIESIDSQVLQEARPPLVSADDEIYSTSKAFIGPIYKPPEKKKRNEGRNEAHVLNGINDRGGQKEKQKFNSEKSEIDNELFQFYKEIEELEKEKDGFENSCKESEPSQEQFVPFYEGHNNGLLKPDEEKKDLSNKAMPSHCDYQQNLGNEPDKYPCNGQVIPTFCDTSFTSFRPEWQSVYPFIVPYGPPLPSLNYHLNIQRFSGPPNPPSNIFQAQDDSQIQNGYYVNNCHVNWNCMTFDQNNEYTDCSENRSSVHPSGNGCSMQDRYVSNGFCEVRERCWKDHCMDKHNGTDRFVNQQFQEEKLNKLQKLLILLRGLPGSGKTTLSRILLGQNRDGIVFSTDDYFHHQDGYRYNVNQLGDAHDWNQNRAKQAIDQGRSPVIIDNTNIQAWEMKPYVEVAIGKGYRVEFHEPETWWKFDPEELEKRNKHGVSRKKIAQMLDRYEYQMSISIVMNSVEPSHKSTQRPPPPQGRQRERVLKKTGHRLSKTKQKRNRKRNKKQNSQNRIMEENSLEFLSDLTPGDQDPSQSEEEDIEKTRRESEYPFIDGLQNEVGDFVTGYKEKRWKNKDPKDSFQNVMSIVELDNTPKNYLSKEGDNLFVSLLLRPNEISVTCPILTQNLSCVTTDDCSGMKVEKHIRNRHTIALDTQDLSAETSCLFMKKREIVDKNLSHEPILCHQHGIRMSDKVLREEQVYTTKINHWAFFTTNLSDEDLQLGSDRQPYFGSWPAGPHKFICEQRPKKDRACKLAGPDSRGQWIQMIFTSVAASEPGNNPEILTDKLLIGNEDFSPPPETMDSFIETNLFRSCLPQPDIPKNALESTKNKKRRKK

SEQ ID NO: 99053 - protein, 1051 aa, Homo sapiens
MERFRLEKKLPGPDEEAVVDLGKTSSTVNTKFEKEELESHRAVYIGVHVPFSKESRRRHRHRGHKHHHRRRKDKESDKEDGRESPSYDTPSQRVQFILGTEDDDEEHIPHDLFTEMDELCYRDGEEYEWKETARWLKFEEDVEDGGDRWSKPYVATLSLHSLFELRSCILNGTVMLDMRASTLDEIADMVLDNMIASGQLDESIRENVREALLKRHHHQNEKRFTSRIPLVRSFADIGKKHSDPHLLERNGILASPQSAPGNLDNSKSGEIKGNGSGGSRENSTVDFSKESASWHCSCGTLGVGLKRPAVDMNFMRKIPTGAEASNVLVGEVDFLERPIIAFVRLAPAVLLTGLTEVPVPTRFLFLLLGPAGKAPQYHEIGRSIATLMTDEIFHDVAYKAKDRNDLLSGIDEFLDQVTVLPPGEWDPSIRIEPPKSVPSQEKRKIPVFHNGSTPTLGETPKEAAHHAGPELQRTGRLFGGLILDIKRKAPFFLSDFKDALSLQCLASILFLYCACMSPVITFGGLLGEATEGRISAIESLFGASLTGIAYSLFAGQPLTILGSTGPVLVFEKILYKFCRDYQLSYLSLRTSIGLWTSFLCIVLVATDASSLVCYITRFTEEAFAALICIIFIYEALEKLFDLGETYAFNMHNNLDKLTSYSCVCTEPPNPSNETLAQWKKDNITAHNISWRNLTVSECKKLRGVFLGSACGHHGPYIPDVLFWCVILFFTTFFLSSFLKQFKTKRYFPTKVRSTISDFAVFLTIVIMVTIDYLVGVPSPKLHVPEKFEPTHPERGWIISPLGDNPWWTLLIAAIPALLCTILIFMDQQITAVIINRKEHKLKKGAGYHLDLLMVGVMLGVCSVMGLPWFVAATVLSISHVNSLKVESECSAPGEQPKFLGIREQRVTGLMIFILMGLSVFMTSVLKFIPMPVLYGVFLYMGVSSLKGIQLFDRIKLFGMPAKHQPDLIYLRYVPLWKVHIFTVIQLTCLVLLWVIKVSAAAVVFPMMVLALVFVRKLMDLCFTKRELSWLDDLMPESKKKKEDDKKKKEKE

SEQ ID NO: 99054 - protein, 1250 aa, Homo sapiens
MIKTEKSYPERRLRGVLEELSCGCCRFLSLADKDQGHSSRTRLDRERLKSCMRELENMGQQARMLRAQVKRHTVRDKLRLCQNFLQKLRFLADEPQHSIPDIFIWMMSNNKRVAYARVPSKDLLFSIVEEETGKDCAKVKTLFLKLPGKRGFGSAGWTVQAKVELYLWLGLSKQRKEFLCGLPCGFQEVKAAQGLGLHAFPPVSLVYTKKQAFQLRAHMYQARSLFAADSSGLSDPFARVFFINQSQCTEVLNETLCPTWDQMLVFDNLELYGEAHELRDDPPIIVIEIYDQDSMGKADFMGRTFAKPLVKMADEAYCPPRFPPQLEYYQIYRGNATAGDLLAAFELLQIGPAGKADLPPINGPVDVDRGPIMPVPMGIRPVLSKYRVEVLFWGLRDLKRVNLAQVDRPRVDIECAGKGVQSSLIHNYKKNPNFNTLVKWFEVDLPENELLHPPLNIRVVDCRAFGRYTLVGSHAVSSLRRFIYRPPDRSAPSWNTTVRLLRRCRVLCNGGSSSHSTGEVVVTMEPEVPIKKLETMVKLDATSEAVVKVDVAEEEKEKKKKKKGTAEEPEEEEPDESMLDWWSKYFASIDTMKEQLRQQEPSGIDLEEKEEVDNTEGLKGSMKGKEKARAAKEEKKKKTQSSGSGQGSEAPEKKKPKIDELKVYPKELESEFDNFEDWLHTFNLLRGKTGDDEDGSTEEERIVGRFKGSLCVYKVPLPEDVSREAGYDSTYGMFQGIPSNDPINVLVRVYVVRATDLHPADINGKADPYIAIRLGKTDIRDKENYISKQLNPVFGKSFDIEASFPMESMLTVAVYDWDLVGTDDLIGETKIDLENRFYSKHRATCGIAQTYSTHGYNIWRDPMKPSQILTRLCKDGKVDGPHFGPPGRVKVANRVFTGPSEIEDENGQRKPTDEHVALLALRHWEDIPRAGCRLVPEHVETRPLLNPDKPGIEQGRLELWVDMFPMDMPAPGTPLDISPRKPKKYELRVIIWNTDEVVLEDDDFFTGEKSSDIFVRGWLKGQQEDKQDTDVHYHSLTGEGNFNWRYLFPFDYLAAEEKIVISKKESMFSWDETEYKIPARLTLQIWDADHFSADDFLGAIELDLNRFPRGAKTAKQCTMEMATGEVDVPLVSIFKQKRVKGWWPLLARNENDEFELTGKVEAELHLLTAEEAEKNPVGLARNEPDPLEKPNRPDTSFIWFLNPLKSARYFLWHTYRWLLLKLLLLLLLLLLLALFLYSVPGYLVKKILGA

SEQ ID NO: 99055 - protein, 7366 aa, Homo sapiens
MKGARWRRVPWVSLSCLCLCLLPHVVPGTTEDTLITGSKTPAPVTSTGSTTATLEGQSTAASSRTSNQDISASSQNHQTKSTETTSKAQTDTLTQMMTSTLFSSPSVHNVMETVTQETAPPDEMTTSFPSSVTNTLMMTSKTITMTTSTDSTLGNTEETSTAGTESSTPVTSAVSITAGQEGQSRTTSWRTSIQDTSASSQNHWTRSTQTTRESQTSTLTHRTTSTPSFSPSVHNVTGTVSQKTSPSGETATSSLCSVTNTSMMTSEKITVTTSTGSTLGNPGETSSVPVTGSLMPVTSAALVTVDPEGQSPVTFSRTSTQDTTAFSKNHQTQSVETTRVSQINTLNTLTPVTTSTVLSSPSGFNPSGTVSQETFPSGETTISSPSSVSNTFLVTSKVFRMPISRDSTLGNTEETSLSVSGTISAITSKVSTIWWSDTLSTALSPSSLPPKISTAFHTQQSEGAETTGRPHERSSFSPGVSQEIFTLHETTTWPSSFSSKGHTTWSQTELPSTSTGAATRLVTGNPSTGAAGTIPRVPSKVSAIGEPGEPTTYSSHSTTLPKTTGAGAQTQWTQETGTTGEALLSSPSYSVTQMIKTATSPSSSPMLDRHTSQQITTAPSTNHSTIHSTSTSPQESPAVSQRGHTQAPQTTQESQTTRSVSPMTDTKTVTTPGSSFTASGHSPSEIVPQDAPTISAATTFAPAPTGDGHTTQAPTTALQAAPSSHDATLGPSGGTSLSKTGALTLANSVVSTPGGPEGQWTSASASTSPDTAAAMTHTHQAESTEASGQTQTSEPASSGSRTTSAGTATPSSSGASGTTPSGSEGISTSGETTRFSSNPSRDSHTTQSTTELLSASASHGAIPVSTGMASSIVPGTFHPTLSEASTAGRPTGQSSPTSPSASPQETAAISRMAQTQRTRTSRGSDTISLASQATDTFSTVPPTPPSITSSGLTSPQTQTHTLSPSGSGKTFTTALISNATPLPVTYASSASTGHTTPLHVTDASSVSTGHATPLPVTDTSSESTGHATPLPVTSPSSVSTGHTTPLPVTDTSSESTGHVTPLPVTSLSSASTGDSTPLPVTDTSSASTGHVTPLPVTSLSSASTGDTTPLPVTDTSSASTGHATSLPVTDTSSVSTGHTTPLPVTDTSSASTGHATSLPVTDTSSVSTAHATPLPVTGLSSASTDDTTRLPVTDVSSASTGQAIPLPVTSPSSASTGDTTPLPVTDASSASTGDTTSLPVTIPSSASSGHTTSLPVTDASSVSTGHATSLLVTDASSVSTGDTTPLPVTDTNSASTGDTTPLHVTDASSVSTGHATSLPVTSLSSASTGDTTPLPVTSPSSASSGHTTPLPVTDASSVPTGHATSLPVTDASSVSTGHATPLPVTDASSVSTGHATPLPVTDTSSVSTGQATPLPVTSLSSASTGDTTPLPVTDTSSASTGQDTPLPVTSLSSVSTGDTTPLPVTSPSSASTGHATPLLVTDASSVSTGHATSLLVTDASSVSTGHATALHVTDASSLSTGDTTPLPVTSPSSASTGDTTPLPVTDTSSASTGHATSLPVTDTSSASTGHATPLPVTDTSSASTGQATPLPVTGPSSASTGHAIPLLVTDTSSASTGQATPLPVTSLSSASTGDTTPLPVTDASSVSTGHATSLPVTSLSSVSTGDTTPLPVTSPSSASSGHTTPLPVTDASSVSTGDTTPLPVTSPSSASSGHTTPLPVTSPSSASSGHTTPLPVTDASSASTGDTTPLPVTDTSSASTGHATHLPVTGLSSASTGDTTRLPVTNVSSASTGHATPLPVTSTSSASTGDTTPLPGTDTSSVSTGHTTPLLVTDASSVSTGDTTRLPVTSPSSASTGHTTPLPVTDTPSASTGDTTPLPVTNASSLSTRHTTSLHVTSPSSASTGHATSLPVTDTSSVSTGHATPLHVTSPSSASTGDTTPLPVTDTYSASTGQATPLPVTDTSSASTGDTTPLPVTDTSSASTGHATPLPVTNTSSVSTGHATPLHVTSPSSASTGHTTPLPVTDASSVSTGHATSLPVTDASSVFTGHATSLPVTIPSSASSGHTTPLPVTDASSVSTGHATSLPVTDASSVSTGHATPLPVTDASSVSTGHATPLPVTDTSSVSTGHATPLPLTSLSSVSTGDTTPLPVTDTSSASTGQATPLPVTSLSSVSTGDTTPLPVTDTSSASTGHATSLPVTDTSSASTGHATPLPDTDTSSASTGHATPLPVTDTSSASTGHATLLPVTDTSSASIGHATPLPVTDTSSISTGHATPLHVTSPSSASTGHATPLPVTDTSSASTGHANPLHVTSPSSASTGHATPLPVTDTSSASTGHATPLPVTSLSSVSTGDTTPLPVTSPSSASTGHTTPLPVTDTSSASTGQATALPVTSTSSASTGDTTPLPVTDTSSASTGQATPLPVTSLSSVSTGDTTPLPVTSPSSASTGHATPLLVTDASSASTGQATPLPVTDTSSAYTGDTTSLPVTDTSSSSTGDTTPLLVTETSSASTGHATPLHVTSPSSASTGDTTPVPVTDTSSVSTGHATPLPVTGLSSASTGDTTRLPVTDISSASTGQATPLPVTNTSSASTGHATPLPVTGLSSASTGDTTRLPVTDISSASTGQATPLPVTNTSSVSTGDTMPLPVTSPSSASTGHATPLPVTSTSSASTGHATPVPVTSTSSASTGHTTPLPVTDTSSASTGDTTPLPVTSPSSASTGHTTPLHVTIPSSASTGDTSTLPVTGASSASTGHATPLPVTDTSSVSTGHATPLPVTSFSSVSTGDTTPLPVTDTSSVSTGHATPLPVTSFSSVSTGDTTPLPVTDASSASTGHATPLPVTDTSSVSTGHATPLPLTSLSSVSTGDTTTLPVTDTSSVSTGHATPLPVTSFSSVSTGDTTPLPVTDASSASTGHATPLPVTDTSSVSTGHATPLPVTSLSSVSTGDTTPLPVTDASSASTGQATPLPVTSLSSVSTGDTTPLPVTIPSSASSGHTTSLPVTDTSSASTGQATPLPVTSLSSVSTGDTTPLLVTDASSVSTGHATPLPVTDTSSASTGDTTRLPVTDTSSASTGQATPLPVTSLSSVSTGDTTPLLVTNTSSVSRGHATSLPVTIPSSSSSGHTTPLPVTSTSSVSTGHVTPLPVTSTSSASTGHATSLPVTDTSSVSTGHATSLPVTDTSSVSTGHATPLPVTDASSVSTGHATPLPVTDASSASTGDTTPLPVTNTSSASTGQATPLPVTSLSSVSTGDTMPLPVTSPSSASTGHATPLPVTGLSSASTGDTTPLPVTDTSSASTGHVTPLPVTSLSSASTGDSTPLPVTDTSSASTGHVTPLPVTSLSSASTGDTTPLPVTDTSSASTGHATPLHVTDASSASTGQATLLPVTSLSSVSTGDTTPLPVTSPSSASTGHATPLLVTDTSSASTGHATPLPVTDASSVSTGHATSLPVTIRSSGSTGHTTPLPVTDTSSASTGQATSLLVTDTSSVSTGDTTPLPVTSTSSASTGHVTPLHVTSPSSASTGHATPLPVTSLSSASTGDTMPLPVTSPSSASTGDTTPLPVTDASSVSTGHTTPLPVTSPSSASTGHTTPLPVTDTTSASKGDTTPLPVTSPSSASTGHTTPLPVTDTSSASTGDTTPLPVTSPSSASTGHATPLPVTNASSLSTGHATPLHVTSPSSASTGHATPLPVTSTSSASTGHATSLPVTSTSSASTGHATPLPVTDNSSVSTGHATPLPVTGLSSATTDDTTRLPVTDVSSASTGQATPLPVTSLSSVSTGDTTPLPVTSPSSASTGHASPLLVTDASSASTGQATPLPVTDTSSVSTAHATPLPVTGLSSASTDDTTRLPVTDVSSASTGQAIPLPVTSPSSASTGDTTPLPVTDASSASTGDTTSLPVTIPSSASSGHTTSLPVTDASSVSTGHATSLLVTDASSVSTGDTTPLPVTDTNSASTGDTTPLHVTDASSVSTGHATSLPVTSLSSASTGDTTPLPVTSPSSASSGDTTPLPVTDTSSASTGHATHLPVTGLSSASTGDTTRLPVTNVSSASTGHATPLPVTSTSSASTGDTTPLPGTDTSSVSTGHTTPLLVTDASSVSTGDTTRLPVTSPSSASTGHTTPLHVTDASSVSTGHTTPLPVTDTSSASTGQATSLLVTDTSSVSTGDTTPLPVTSTSSASTGHVTPLHVTSPSSASTGHATPLPVTSLSSASTGDTTPLPVTDTSSVSTGHTTPLPVTSPSSASTGHTTPLPVTDTSSASKGDTTPLPVTSPSSASTGHTTPLPVTDTSSASTGDTTPLPVTNASSLSTGHATPLHVTSPSSASTGHATPLPVTSTSSASTGHATPLPVTSTSSASTGHATPLPVTDNSSVSTGHATPLPVTGLSSATTDDTTRLPVTDVSSASTGQATPLPVTSLSSVSTGDTTPLPVTSPSSASTGHASPLLVTDASSASTGQATPLPVTDTSSVSTAHATPLPVTGLSSASTDDTTRLPVTDVSSASTGQAIPLPVTSPSSASTGDTTPLPVTDASSASTGDTTSLPVTIPSSASSGHTTSLPVTDASSVSTGHATSLLVTDASSVSTGDTTPLPVTDTNSASTGDTTPLHVTDASSVSTGHATSLPVTSLSSASTGDTTPLPVTSPSSASSGHTTSLPVTDASSVSTGHATSLPVTIPSSASSGHTTPLPVTDASSVPTGHATSLPVTDASSVSTGHATPLPVTDASSVSTGHATPLPVTDTSSVSTGQATPLPVTSLSSASSTGDTTPLPVTDTSSASTGQDTPLPVTSLFSVSTGDTTPLPVTSPSSASTGHATHLLVTDASSVSTGHATSLLVTDASSVSTGHATALHVTDASSLSTGDTTPLPVTSPSSASTGDTTPLPVTDTSSVSTGHATSLPVTDTSSASTGHATSLPVTDTSSASTGQATPLPVTSPSSASTGHAIPLLVTDTSSASTGQATPLPVTSLSSASTGDTTPLPVTDASSVSTGHATSLPVTSLSSVSTGDTTPLPVTSPSSASTGHATPLHVTSPSSASTGHATPLPVTSLSSASTGDTTPLPVTSPSSASTGHATPLHVTDASSVSTGDTTPLPVTSPSSASSGHTTPLPVTDASSASTGDTTPLPVTDTSSASTGHATHLPVTGLSSASTGDTTRLPVTDVSSASTGHATPLPVTSTSSASTGDTTPLPGTDTSSVSTGHTTPLLVTDASSVSTGDTTRLPVTSPSSASTGHTTPLPVTDTPSASTGDTTPLPVTNASSLSTRHATSLHVTSPSSASTGHATPLPVTDTSAASTGHATPLPVTSTSSASTGDTTPLPVTDTSSASTGHATPLPVTNTSSVSTGHATPLHVTSPSSASTGHTTPLPVTDASSVSTGHATSLPVTDASSVSTGHATPLPVTDASSVSTGHATPLPLTSLSSVSTGDTTPLPVTDTSSASTGQATPLPVTSLSSVSTGDTTPLPVTDTSSASTGHATSLPVTDTSSASTGHATPLPVTDTSSISTGHATPLHVTSPSSASTGHATPLPVTDTSSASTGHATPLPVTSLSSVSTGDTTPLPVTSPSSASTGHATPLLVTDASSASTGQATPLPVTSLSSVSTGDTTPLPVTSPSSASTGHATSLPVTDTSSASTGDTTSLPVTDTSSAYTGDTTSLPVTDTSSSSTGDTTPLLVTETSSASTGDTTPVPVTDTSSVSTGHATPLPVTGLSSASTGDTTRLPVTDISSASTGQATPLPVTNTSSVSTGDTMPLPVTSPSSASTGHATPLPVTSTSSASTGHATPVPVTSTSLASTGHTTPLPVTSPSSASTGHTTPLPVTDTSSASTGDTTPLPVTNASSLSTGHTTPLHVTIPSSASTGDTSTLPVTGASSASTGHATPLPVTDTSSVSTGHATPLPVTSFSSVSTGDTTPLPVTDASSASTGHATPLPVTDTSSASTGDTTPLPVTDASSASTGQATPLPVTSLSSVSTGDTTPLPVTIPSSASSGHTTSLPVSDTSSASTGQATPLPVTSLSSVSTGDTTPLLVTDASSVSTGHATPLPVTDTSSASTGDTTRLPVTDTSSASTGQATPLPVTSLSSVSTGDTTPLLVTNTSSVSTGHATSLPVTIPSSSSSGHTTPLPVTSTSSVSTGHVTPLHVTSPSSSSTGQATPLPVTSTSSVSTGHVTPLHVTSPSSASTGHATPLPVTSTSSASTGHATPLPVTDASSVSTGHATPLPVTDTSSASTGDTTPLPVTDTSSASTGQATPLPVTSLSSVSTGHATPLAVSSATSASTVSSDSPLKMETSGMTTPSLKTDGGRRTATSPPPTTSQTIISTIPSTAMHTRSTAAPIPILPERGVSLFPYGADAGDLEFVRRTVDFTSPLFKPATGFPLGSSLRDSLYFTDNGQIIFPESDYQIFSYPNPLPTGFTGRDPVALVAPFWDDADFSTGRGTTFYQSNTYQAILSTDGSRSYALFLYQSGGMQWDVAQRSGNPVLMGFSSGDGYFENSPLMSQPVWERYRPDRFLNSNSGLQGLQFYRLHREERPNYRLECLQWLKSQPRWPSWGWNQVSCPCSWQQGRRDLRFQPVSIGRWGLGSRQLCSFTSWRGGVCCSYGPWGEFREGWHVQRPWQLAQELEPQSWCCRWNDKPYLCALYQQRRPHVGCATYRPPQPAWMFGDPHITTLDGVSYTFNGLGDFLLVGAQDGNSSFLLQGRTAQTGSAQATNFIAFAAQYRSSSLGPVTVQWLLEPHDAIRVLLDNQTVTFQPDHEDGGGQETFNATGVLLSRNGSEVSASFDGWATVSVIALSNILHASASLPPEYQNRTEGLLGVWNNNPEDDFRMPNGSTIPPGSPEEMLFHFGMTWQINGTGLLGKRNDQLPSNFTPVFYSQLQKNSSWAEHLISNCDGDSSCIYDTLALRNASIGLHTREVSKNYEQANATLNQYPPSINGGRVIEAYKGQTTLIQYTSNAEDANFTLRDSCTDLELFENGTLLWTPKSLEPFTLEILARSAKIGLASALQPRTVVCHCNAESQCLYNQTSRVGNSSLEVAGCKCDGGTFGRYCEGSEDACEEPCFPSVHCVPGKGCEACPPNLTGDGRHCAALGSSFLCQNQSCPVNYCYNQGHCYISQTLGCQPMCTCPPAFTDSRCFLAGNNFSPTVNLELPLRVIQLLLSEEENASMAEVNASVAYRLGTLDMRAFLRNSQVERIDSAAPASGSPIQHWMVISEFQYRPRGPVIDFLNNQLLAAVVEAFLYHVPRRSEEPRNDVVFQPISGEDVRDVTALNVSTLKAYFRCDGYKGYDLVYSPQSGFTCVSPCSRGYCDHGGQCQHLPSGPRCSCVSFSIYTAWGEHCEHLSMKLDAFFGIFFGALGGLLLLGVGTFVVLRFWGCSGARFSYFLNSAEALP

SEQ ID NO: 99056 - protein, 543 aa, Homo sapiens
  MOD_RES (1)..(1): Any amino acid
XCVKTELLGEETPMAADEGSAEKQAGEAHMAADGETNGSCENSDASSHANAAKHTQDSARVNPQDGTNTLTRIAENGVSERDSEAAKQNHVTADDFVQTSVIGSNGYILNKPALQAQPLRTTSTLASSLPGHAAKTLPGGAGKGRTPSAFPQTPAAPPATLGEGSADTEDRKLPAPGADVKVHRARKTMPKSVVGLHAASKDPREVREARDHKEPKEEINKNISDFGRQQLLPPFPSLHQSLPQNQCYMATTKSQTACLPFVLAAAVSRKKKRRMGTYSLVPKKKTKVLKQRTVIEMFKSITHSTVGSKGEKDLGASSLHVNGESLEMDSDEDDSEELEEDDGHGAEQAAAFPTEDSRTSKESMSEADRAQKMDGESEEEQESVDTGEEEEGGDESDLSSESSIKKKFLKRKGKTDSPWIKPARKRRRRSRKKPSGALGSESYKSSAGSAEQTAPGDSTGYMEVSLDSLDLRVKGILSSQAEGLANGPDVLETDGLQEVPLCSCRMETPKSREITTLANNQCMATESVDHEVLNRIQWSQIPV

SEQ ID NO: 99057 - protein, 182 aa, Homo sapiens
MCQGGPELASVDWGRTGRAARRQVRPRWVWGLSPYSPHSPPGCGVPAIHPVLSGLSRIVNGEDAVPGSWPWQVSLQDKTGFHFCGGSLISEDWVVTAAHCGVRTSDVVVAGEFDQGSDEENIQVLKIAKVFKNPKFSILTVNNDITLLKLATPARFSQTVSAVCLPSADDDFPAGTLCATTG

SEQ ID NO: 99058 - protein, 158 aa, Homo sapiens
MFSPPVSSGKNGPTSLASGHFTGSNVEDRSSSGSWGNGGHPSPSRNYGDGTPYDHMTSRDLGSHDNLSPPFVNSRIQSKTERGSYSSYGRESNLQGCHQQSLLGGDMDMGNPGTLSPTKPGSQYYQYSSNNPRRRPLHSSAMEVQTKKVRKVPPGLPS

SEQ ID NO: 99059 - protein, 165 aa, Homo sapiens
MHSRPRRRRRRGHTRRRPPVLPFGGGSGGARAAAQRAEPRSGRQRVPRALRLPPPASRGSSSPVRGPSSSAESSPSSSAMAGWNAYIDNLMADGTCQDAAIVGYKDSPSVWAAVPGKTFVNITPAEVGVLVGKDRSSFYVNGLTLGGQKCSVIRDSLLQDGEFSM

SEQ ID NO: 99060 - protein, 859 aa, Homo sapiens
MPHKIGFVVVSSSGHEDGFSARELMIHAPTVSGWRSPRFCQFPQEIVLQMVERCRIRKLQLLAHQYMISSKIEFYISESLPEYFAPYQAERFRRLGYVSLCDNEKTGCKARELKSVYVDAVGQFLKLIFHQNHVNKYNIYNQVALVAINIIGDPADFSDESNTASREKLIDHYLGHNSEDPALEGTYARKSDYISPLDDLAFDMYQDPEVAQIIRKLDERKREAVQKERYDYAKKLKQAIADLQKVGERLGRYEVEKRCAVEKEDYDLAKEKKQQMEQYRAEVYEQLELHSLLDAELMRRPFDLPLQPLARSGSPCHQKPMPSLPQLEERGTENQFAEPFLQEKPSSYSLTISPQHSAVDPLLPATDPHPKINVAEAYCKTWSYREDALLALSKKLMEMPVGTPKEDLKNTLRASVFLVRRAIKDIVTSVFQASLKLLKMIITQYIPKHKLSKLETAHCVERTIPVLLTRTGDSSARLRVTAANFIQEMALFKEVKSLQIIPSYLVQPLKANSSVHLAMSQMGLLARLLKDLGTGSSGFTIDNVMKFSVSALEHRVYEVRETAVRIILDMYRQHQASILEYLPPDDSNTRRNILYKTIFEGFAKIDGRATDAEMRARRKAATEEAEKQKKEEIKALQGQLAALKEIQAEVQEKESDAVKPKNQDIQGGKAAPAEALGIPDEHYLDNLCIFCGERSESFTEEGLDLHYWKHCLMLTRCDHCKQVVEISSLTEHLLTECDKKDGFGKCYRCSEAVFKEELPRHIKHKDCNPAKPEKLANRCPLCHENFSPGEEAWKAHLMGPAGCTMNLRKTHILQKAPALQPGKSSAVAASGPLGSKAGSKIPTPKGGLSKSSSRTYAKR

SEQ ID NO: 99061 - protein, 46 aa, Homo sapiens
MSSISVVNHQETLQHVPSDHTNETSNSTVKPPTSVASDSSNTTVTT

SEQ ID NO: 99062 - protein, 424 aa, Homo sapiens
MAWALKLPLADEVIESGLVQDFDASLSGIGQELGAGAYSMSDVLALPIFKQEESSLPPDNENKILPFQYVLCAATSPAVKLHDETLTYLNQGQSYEIRMLDNRKLGELPEINGKLVKSIFRVVFHDRRLQYTEHQQLEGWRWNRPGDRILDIDIPMSVGIIDPRANPTQLNTVEFLWDPAKRTSVFIQVHCISTEFTMRKHGGEKGVPFRVQIDTFKENENGEYTEHLHSASCQIKVFKPKGADRKQKTDREKMEKRTPHEKEKYQPSYETTILTECSPWPEITYVNNSPSPGFNSSHSSFSLGEGMVRPRLTIYVCQESLQLREQQQQQQQQQQKHEDGDSNGTFFVYHAIYLEELTAVELTEKIAQLFSISPCQISQIYKQGPTGIHVLISDEMIQNFQEEACFILDTMKAETNDSYHIILK

SEQ ID NO: 99063 - protein, 243 aa, Homo sapiens
  MOD_RES (1)..(1): Any amino acid
XFLVSEYLKDASKKMKNGLMFVKLVNPCSGEGAIYLFNMCLQQLFEVKVFKEKHHSWFINQSVQSGGLLHFATPVDPLFLLLHYLIKADKEGKFQPLDQVVVDNVFPNCILLLKLPGLEKLLHHVTEEKGNPEIDNKKYYKYSKEKTLKWLEKKVNQTVAALKTNNVNVSSRVQSTAFFSGDQASTDKEEDYIRYAHGLISDYIPKELSDDLSKYLKLPEPSASLPNPPSKIQRMEKPIINHT

SEQ ID NO: 99064 - protein, 44 aa, Homo sapiens
MRGERRPLWEEESNAKGGVWKMKVPKDSTSTVWKELLLATIGEQ

SEQ ID NO: 99065 - protein, 134 aa, Homo sapiens
MEAVIIRVQSPDGVKRITATKRETAATFLKKVAKEFGFQNNGFSVYINRNKTGEITASSNKSLNLLKIKHGDLLFLFPSSLAGPSSEMETSVPPGFKVFGAPNVVEDEIDQYLSKQDGKIYRSRDPQLHSMRTI

SEQ ID NO: 99066 - protein, 73 aa, Homo sapiens
MVGLNSEEVERALCSRTMETAKEKVVTALNVMQAQYARDALAKNIYSRLFDWIVNRINESIKVGIGEKKKVMG

SEQ ID NO: 99067 - protein, 119 aa, Homo sapiens
MKATIILLLLAQVSWAGPFQQRGLFDFMLEDEASGIGPEVPDDRDFEPSLGPVCPFRCQCHLRVVQCSDLGLDKVPKDLPPDTTLLDLQNNKITEIKDGDFKNLKNLHALILVNNKISK

SEQ ID NO: 99068 - protein, 189 aa, Homo sapiens
MSTVHEILCKLSLEGDHSTPPSAYGSVKAYTNFDAERDALNIETAIKTKGVDEVTIVNILTNRSNAQRQDIAFAYQRRTKKELASALKSALSGHLETVILGLLKTPAQYDASELKASMKGLGTDEDSLIEIICSRTNQELQEINRVYKEMYKTDLEKDIISDTSGDFRKLMVALAKVEEQRMALSLIMN

SEQ ID NO: 99069 - protein, 142 aa, Homo sapiens
ENTGQLQIHIETIEISGYSCEGYGFKVVNCQEFTLSANASRDIIIFALFLLVIGTAYLEAQGIWEPFRRRLSFEASNPPFDVGRPFDLRRIVGISSEGNLNTLSCDPGHSRGFCGAGGSSSRPSAGSHKQCGPSVHPHSSHS

SEQ ID NO: 99070 - protein, 395 aa, Homo sapiens
MIPTFTALLCLGLSLGPRTHMQAGPLPKPTLWAEPGSVISWGNSVTIWCQGTLEAREYRLDKEESPAPWDRQNPLEPKNKARFSIPSMTEDYAGRYRCYYRSPVGWSQPSDPLELVMTGAYSKPTLSALPSPLVTSGKSVTLLCQSRSPMDTFLLIKERAAHPLLHLRSEHGAQQHQAEFPMSPVTSVHGGTYRCFSSHGFSHYLLSHPSDPLELIVSGSLEGPRPSPTRSVSTAAGPEDQPLMPTGSVPHSGLRRHWEVLIGVLVVSILLLSLLLFLLLQHWRQGKHRTLAQRQADFQRPPGAAEPEPKDGGLQRRSSPAADVQGENFCAAVKNTQPEDGVEMDTRAAASEAPQDVTYARLHSFTLRQKATEPPPSQEGASPAEPSVYATLAIH

SEQ ID NO: 99071 - protein, 393 aa, Homo sapiens
MSGGAAEKQSSTPGSLFLSPPAPAPKNGSSSDSSVGEKLGAAAADAVTGRTEEYRRRRHTMDKDSRGAAATTTTTEHRFFRRSVICDSNATALELPGLPLSLPQPSIPAAVPQSAPPEPHREETVTATATSQVAQQPPAAAAPGEQAVAGPAPSTVPSSTSKDRPVSQPSLVGSKEEPPPARSGSGGGSAKEPQEERSQQQDDIEELETKAVGMSNDGRFLKFDIEIGRGSFKTVYKGLDTETTVEVAWCELQDRKLTKSERQRFKEEAEMLKGLQHPNIVRFYDSWESTVKGKKCIVLVTELMTSGTLKTYLKRFKVMKIKVLRSWCRQILKGLQFLHTRTPPIIHRDLKCDNIFITGPTGSVKIGDLGLATLKRASFAKSVIGMFQVYLGA

SEQ ID NO: 99072 - protein, 251 aa, Homo sapiens
MALLVDRVRGHWRIAAGLLFNLLVSICIVFLNKWIYVYHGFPNMSLTLVHFVVTWLGLYICQKLDIFAPKSLPPSRLLLLALSFCGFVVFTNLSLQNNTIGTYQLAKAMTTPVIIAIQTFCYQKTFSTRIQLTLIPITLGVILNSYYDVKFNFLGMVFAALGVLVTSLYQVWVGAKQHELQVNSMQLLYYQAPMSSAMLLVAVPFFEPVFGEGGIFGPWSVSALSTKKMCTQGSRLNKINNCDCFFKDVLQ

SEQ ID NO: 99073 - protein, 110 aa, Homo sapiens
NAFPVSGQLYTTHLLSLDALLTVIDSTEAHCQAKVLNSLTQQEKKETARPSCEIVDGTREASNSERTASDGKAVGMASDIPGLHLPGGGRLPPEHGKSGCSDLEEAVDSG

SEQ ID NO: 99074 - protein, 83 aa, Homo sapiens
MMEEEELEFVEELEAVLQLTPEVQLAIEQVFPSQDPLDRADFNAVEYINTLFPTEQSKNHEARKDNTRLKCDSVAMKEACQIQ

SEQ ID NO: 99075 - protein, 356 aa, Homo sapiens
  MOD_RES (1)..(1): Any amino acid
XKSKEAEIKRINKELANIRSKFKGDKALDGYSKKKYVCKLLFIFLLGHDIDFGHMEAVNLLSSNRYTEKQIGYLFISVLVNSNSELIRLINNAIKNDLASRNPTFMGLALHCIASVGSREMAEAFAGEIPKVLVAGDTMDSVKQSAALCLLRLYRTSPDLVPMGDWTSRVVHLLNDQHLGVVTAATSLITTLAQKNPEEFKTSVSLAVSRLSRIVTSASTDLQDYTYYFVPAPWLSVKLLRLLQCYPPPDPAVRGRLTECLETILNKAQEPPKSKKVQHSNAKNAVLFEAISLIIHHDRCVGCLCTGSRCAQVRKPFLRDYVNCSQRSFSPEDGRPGSCVLCCLRLCRLSSWPSCR

SEQ ID NO: 99076 - protein, 40 aa, Homo sapiens
  MOD_RES (1)..(1): Any amino acid
XLKSIIGMGTGAGAYILTRFAISGWTQALPDMVVSHLFGK

SEQ ID NO: 99077 - protein, 269 aa, Homo sapiens
  MOD_RES (1)..(1): Any amino acid
XQECTLEEVVERLLSVKGRPRPSPLVKAHKSVQANLDQSQRGSSPQNTTTPKPSVEGQQPAAAAACEPVDHAQSESILKVSQPRALEQQASTPPPPPPPPLLPGSSAEPPPPPPPPPLPSVGAKALPTAPPPPPLPGLGAMAPPAPPLPPPLPGSCEFLPPPPPPLPGLGCPPPPPPLLPGMGWGPPPPPPPLLPCTCSPPVAGGMEEVIVAQVDHGLGSAWVPSHRRVNPPTLRMKKLNWQKLPSNVARAKPKEPTMVAPRARKEPKE

SEQ ID NO: 99078 - protein, 423 aa, Homo sapiens
MAGLQRLASHLPVGVMLPHNTTEAPGPHSAKQDSYEQGDSSQQSLKGHLRNNFQKQLLSNKELILDKVYTHPKWNTQTKARSYSYPHCTGISQQDPESDSQGQGNGLFYSSGPQSWYPKANNQDFIPFTKKRVGVDRAFPLKPMVHRKSCSTGEAGTDGDHNVYPRPPEPREFSSRNFGVRNQGNFSVVGTVLAATQAEKAVANFDRTEWVQIRRLEAAGESLEEEIRRKQILLRGKLKKTEEELRRIQTQKEQAKENENGELQKIILPRSRVKGNKSNTMYKPIFSPEFEFEEEFSRDRREDETWGRSQQNSGPFQFSDYRIQRLKRERLVASNNKIRDPVSEPSVEKFSPPSETPVGALQGSARNSSLSMAPDSSGSSGSIEEPQLVSLLHYRLNLLRRATGDRSMNLLSIRSARLERSSR

SEQ ID NO: 99079 - protein, 181 aa, Homo sapiens; identical to SEQ ID NO: 66396
  MOD_RES (1)..(1): Any amino acid

SEQ ID NO: 99080 - protein, 76 aa, Homo sapiens
VLLSLRILLLMKPSVLSRVSHQVAYGLHELLKTNAANIHSGDDWATLFTLLECIGSGVKPPAALQATARADAPDAE

SEQ ID NO: 99081 - protein, 249 aa, Homo sapiens
MNGQLDLSGKLIIKAQLGEDIRRIPIHNEDITYDELVLMMQRVFRGKLLSNDEVTIKYKDEDGDLITIFDSSDLSFAIQCSRILKLTLFVNGQPRPLESSQVKYLRRELIELRNKVNRLLDSLEPPGEPGPSTNIPENDTVDGREEKSASDSSGKQSTQVMAASMSAFDPLKNQDEINKNVMSAFGLTDDQVSGPPSAPAEDRSGTPDSIASSSSAAHPPGVQPQQPPYTGAQTQAGQIEEYCDSPIWT

SEQ ID NO: 99082 - protein, 361 aa, Homo sapiens
MPTAAAPIISSVQKLVLYETRARYFLVGSNNAETKYRVLKIDRTEPKDLVIIDDRHVYTQQEVRELLGRLDLGNRTKMGQKGSSGLFRAVSAFGVVGFVRFLEGYYIVLITKRRKMADIGGHAIYKVEDTNMIYIPNDSVRVTHPDEARYLRIFQNVDLSSNFYFSYSYDLSHSLQYNLTVLRMPLEMLKSEMTQNRQESFDIFEDEGLITQGGSGVFGICSEPYMKYVWNGELLDIIKSTVHRDWLLYIIHGFCGQSKLLIYGRPVYVTLIARRSSKFAGTRFLKRGANCEGDVANEVETEQILCDASVMSFTAGSYSSYVQVRGSVPLYWSQDISTMMPKPPITCVWSHVFNNNSCPHI

SEQ ID NO: 99083 - protein, 80 aa, Homo sapiens
  MOD_RES (1)..(1): Any amino acid
XGMPFIDVPTPISSASSEAASAVVSPSTDSGLEFSSQTTSKEDLTDLEQPGSPGYSTATEPGSRRDPCGKVPVSICGVHP

SEQ ID NO: 99084 - protein, 102 aa, Homo sapiens
  MOD_RES (1)..(1): Any amino acid
XDRVGCVWQTVRDHLYHLCVQAQDFCFLVERAVVGLLRLAIRLLRREEISAQLLDLMHTLHTRAASIYSSWAEEQRHLETGGQKIEADSRTLWAHCWCPLLQ

SEQ ID NO: 99085 - protein, 68 aa, Homo sapiens
MEDRAGEQEQERHSLRLEKLQHWARHRQSGHLLVLAGLLTGTVTLELRRAPRLWKVRGKKTQHCPPTP

SEQ ID NO: 99086 - protein, 107 aa, Homo sapiens
PQKSRAEDLGLKAKALEKTVASWQHMATEAARTLQTAAQATLRQTEPLTKTLTLSPRLECVARSRLTATSASQLHQEARAALTQASSSVQAATVTVMGARTLLADLE

SEQ ID NO: 99087 - protein, 222 aa, Homo sapiens
MSLTVVSMACVGFFLLQGAWPLMGNHRKPSLLAHPGPLLKSGETVILQCWSDVMFEHFFLHREGISEDPSRLVGQIHDGVSKANFSIGPLMPVLAGTYRCYGSVPHSPYQLSAPSDPLDIVITGLYEKPSLSAQPGPTVQAGENVTLSCSSWSSYDIYHLSREGEAHERRLRAVPKVNRTFQADFPLGPATHGGTYRCFGSFRALPCVWSNSSDPLLVSVTG

SEQ ID NO: 99088 - protein, 17 aa, Homo sapiens
  MOD_RES (1)..(1): Any amino acid
XSEEEVEEPEERQQTPE

SEQ ID NO: 99089 - protein, 66 aa, Homo sapiens
NLMTTLPSQDASLPPQQPYIAGQQPMYQQWGLSRTSAHRGRRIPEAPSQQTERGHKSQGRYAHPQV

SEQ ID NO: 99090 - protein, 49 aa, Homo sapiens
  MOD_RES (1)..(1): Any amino acid
XKALEKAGGKEFLETVKELRKSQGPLEVAEGPRLTQTVQDHLPISRAFT

SEQ ID NO: 99091 - protein, 43 aa, Homo sapiens
MAAGFGRCCRSSPNSRKNFKLLLVNLPERKSSQWLQNMIKLVK

SEQ ID NO: 99092 - protein, 729 aa, Homo sapiens
MVAVGGCRCQPGYQPARGDKACQACPRGLYKASAGNAPCSPCPARSHAPNPAAPVCPCLEGFYRASSDPPEAPCTGPPSAPQELWFEVQGSALMLHWRLPRELGGRGDLLFNVVCKECEGRQEPASGGGGTCHRCRDEVHFDPRQRGLTESRVLVGGLRAHVPYILEVQAVNGVSELSPDPPQAAAINVSTSHEVPSAVPVVHQVSRASNSITVSWPQPDQTNGNILDYQLRYYDQAEDESHSFTLTSETNTATVTQLSPGHIYGFQVRARTAAGHGPYGGKVYFQTLPQGELSSQLPERLSLVIGSILGALAFLLLAAITVLAVVFQRKRRGTGYTEQLQQYSSPGLGVKYYIDPSTYEDPCQAIRELAREVDPAYIKIEEVIGTGSFGEVRQGRLQPRGRREQTVAIQALWAGGAESLQMTFLGRAAVLGQFQHPNILRLEGVVTKSRPLMVLTEFMELGPLDSFLRQREGQFSSLQLVAMQRGVAAAMQYLSSFAFVHRSLSAHSVLVNSHLVCKVARLGHSPQGPSCLLRWAAPEVIAHGKHTTSSDVWSFGILMWEVMSYGERPYWDMSEQEVLNAIEQEFRLPPPPGCPPGLHLLMLDTWQKDRARRPHFDQLVAAFDKMIRKPDTLQAGGDPGERPSQALLTPVALDFPCLDSPQAWLSAIGLECYQDNFSKFGLCTFSDVAQLSLEDLPALGITLAGHQKKLLHHIQLLQQHLRQQGSVEV

SEQ ID NO: 99093 - protein, 98 aa, Homo sapiens
LVQRKARAAAERNLRNERRERAKQARVSQELKKAAKRTVSISEGPDTLGDGMRERRETLALAPEPEPLEKEACEKWKRPFRPRLSFPGTFVGLPQPPP

SEQ ID NO: 99094 - protein, 161 aa, Homo sapiens
MPLRDETLREVWASDSGHEEESLSPEAPRRPKQRPAPAQRLRKKRTEAPESPCPTGSKPRKPGEFLPAEEEEEEEDEEDEEEEAEEKKEKILLPPKKPLREKSSADLKERRAKAQGPRGDLGSPDPPPKPLRVRNKEAPAGEGTKMRKTKKKGSGEADKDP

SEQ ID NO: 99095 - protein, 218 aa, Homo sapiens
MATPAVPVSAPPATPTPVPAAAPASVPAPTPAPAAAPVPAAAPASSSDPAAAAAATAAPGQTPASAQAPAQTPAPALPGPALPGPFPGGRVVRLHPVILASIVDSYERRNEGAARVIGTLLGTVDKHSVEVTNCFSVPHNESEDEVAVDMEFAKNMYELHKKVSPNELILGWYATGHDITEHSVLIHEYYSREAPNPIHLTVDTSLQNGRMSIKAYVR

SEQ ID NO: 99096 - protein, 1056 aa, Homo sapiens
MIAVSFKCRCQILRRLTKDESPYTKSASQTKPPDGALAVRRQSIPEEFKGSTVVELMKKEGTTLGLTVSGGIDKDGKPRVSNLRQGGIAARSDQLDVGDYIKAVNGINLAKFRHDEIISLLKNVGERVVLEVEYELPPVSVQGSSVIFRTVEVTLHKEGNTFGFVIRGGAHDDRNKSRPVVITCVRPGGPADREGTIKPGDRLLSVDGIRLLGTTHAEAMSILKQCGQEAALLIEYDVSVMDSVATASGPLLVEVAKTPGASLGVALTTSMCCNKQVIVIDKIKSASIADRCGALHVGDHILSIDGTSMEYCTLAEATQFLANTTDQVKLEILPHHQTRLALKGPDHAALVSSSFSPTSMSAYSLSSLNMGTLPRSLYSTSPRGTMMRRRLKKKDFKSSLSLASSTVGLAGQVVHTETTEVVLTADPVTGFGIQLQGSVFATETLSSPPLISYIEADSPAERCGVLQIGDRVMAINGIPTEDSTFEEASQLLRDSSITSKVTLEIEFDVAESVIPSSGTFHVKLPKKHNVELGITISSPSSRKPGDPLVISDIKKGSVAHRTGTLELGDKLLAIDNIRLDNCSMEDAVQILQQCEDLVKLKIRKDEDNSDEQESSGAIIYTVELKRYGGPLGITISGTEEPFDPIIISSLTKGGLAERTGAIHIGDRILAINSSSLKGKPLSEAIHLLQMAGETVTLKIKKQTDAQSASSPKKFPISSHLSDLGDVEEDSSPAQKPGKLSDMYPSTVPSVDSAVDSWDGSAIDTSYGTQGTSFQASGYNFNTYDWRSPKQRGSLSPVTKPRSQTYPDVGLSYEDWDRSTASGFAGAADSAETEQEENFWSQALEDLETCGQSGILRELEATIMSGSTMSLNHEAPTPRSQLGRQASFQERSSSRPHYSQTTRSNTLPSDVGRKSVTLRKMKQEIKEIMSPTPVELHKVTLYKDSDMEDFGFSVADGLLEKGVYVKNIRPAGPGDLGGLKPYDRLLQVNHVRTRDFDCCLVVPLIAESGNKLDLVISRNPLASQKSIDQQSLPGDWSEQNSAFFQQPSHGGNLETRE

SEQ ID NO: 99097 - protein, 334 aa, Homo sapiens
  MOD_RES (1)..(1): Any amino acid
XLSELQDDLTLDDTSEALNQLKLASIDEKNWPSDEMPDFPKSDDSKSSSPELVTHLKWDDPYYDIARHQIVEVAGDDKYGRKIIVFSACRMPPSHQLDHSKLLGYKKNIKALYIVHPTMFIKTLLILFKPLISFKFGQKIFYVNYLSELSEHVKLEQLGIPRQVLKYDDFLKSTQKSPATAPKPMPPRPPLPNQQFGVSLQHLQEKNPEQEPIPIVLRETVAYLQAHALTTEGIFRRSANTQVVREVQQKYNMGLPVDFDQYNELHLPAVILKTFLRELPEPLLTFDLYPHVVGFLNIDESQRVPATLQVLQTLPEENYQVLRFLTAFLVQISA

SEQ ID NO: 99098 - protein, 139 aa, Homo sapiens
MSAVLLLALLGFILPLPGVQALLCQFGTVQHVWKVSDLPRQWTPKNTSCDSGLGCQDTLMLIESGPQVSLVLSKGCTEAKDQEPRVTEHRMGPGLSLISYTFVCRQEDFCNNLVNSLPLWAPQPPAGACGRVGRRGRGC

SEQ ID NO: 99099 - protein, 399 aa, Homo sapiens
  MOD_RES (1)..(1): Any amino acid
XHPTFDPLINNTWLSRSRAQKRFQQVARKVMIQGRLFNMLSAVREMDKESILRKIGQAKQSIAQEANFFKFFLRRISQDDYTSRFSVSPKEVLPFAFPDCSPPQDSNELAPDGLGLVPIKSSEVQIKQSYSFFNLQVPQLYKIKRYQPFSVHKSSTSYRPQKLARALKQGAEDEVTTITALPKQDSTTQLSGKTSVLSMKPPEALAMSLDYDPLYVFNPNPGLFAVMHPLTYAETLIDYHLCSHPKYKFTKESRHGSSIPVTQKQFLHHTDIIPGIMHWKSFQSLVLSSLPDPSKMETTKSCDSFNSFMLPIDVPAILDALPEEDRLETVERELCEQNVEVMLTPEMIKVEFPMLNYKDIRKEKEVKDQAQPAEKAGEKLLEEMRNLRGKALNTYLILE

SEQ ID NO: 99100 - protein, 93 aa, Homo sapiens
MSPDEIKIPPEPPGRCSNHLQDKIQKLYERKIKEGMDMNYIIQRKKEFRNPSIYEKLIQFCAIDELGTNYPKDMFDPHGWSEDSYYEALAKAQ

SEQ ID NO: 99101 - protein, 311 aa, Homo sapiens
MVKGQPFDVGPRYTQLQYIGEGAYGMVSSAYDHVRKTRVAIKKISPFEHQTYCQRTLREIQILLRFRHENVIGIRDILRASTLEAMRDVYIVQDLMETDLYKLLKSQQLSNDHICYFLYQILRGLKYIHSANVLHRDLKPSNLLINTTCDLKGYTKSIDIWSVGCILAEMLSNRPIFPGKHYLDQLNHILGILGSPSQEDLNCIINMKARNYLQSLPSKTKVAWAKLFPKSDSKALDLLDRMLTFNPNKRITVEEALAHPYLEQYYDPTDEPVAEEPFTFAMELDDLPKERLKELIFQETARFQPGVLEAP

SEQ ID NO: 99102 - protein, 42 aa, Homo sapiens
MRLKMTTRNFPEREVPCDVEVERFTREVPCLSSLGDGWDCEN

SEQ ID NO: 99103 - protein, 115 aa, Homo sapiens
MVLLRVLILLLSWAAGMGGQYGNPLNKYIRHYEGLSYNVDSLHQKHQRAKRAVSHEDQFLRLDFHAHGRDGVLPCCPGWSQTPGLKRSTCLSLPQCWDYRCEPSPMISVFDYPHK

SEQ ID NO: 99104 - protein, 128 aa, Homo sapiens
MDMGNPGTLSPTKPGSQYYQYSSNNPRRRPLHSSAMEVQTKKVRKVPPGLPSSVYAPSASTADYNRDSPGYPSSKPATSTFPSSFFMQDGHHSSDPWSSSSGMNQPGYAGMLGNSSHIPQSSSYCSLH

SEQ ID NO: 99105 - protein, 36 aa, Homo sapiens
MEHRIVGPGPYRATRLFLFLRPGAVAHSCNSSTLGG

SEQ ID NO: 99106 - protein, 324 aa, Homo sapiens
  MOD_RES (1)..(1): Any amino acid
XGLGGGDSGDGTARAASKCQMMEERANLMHMMKLSIKVLLQSALSLGRSLDADHAPLQQFFVVMEHCLKHGLKVKKSFIGQNKSFFGPLELVEKLCPEASDIATSVRNLPELKTAVGRGRAWLYLALMQKKLADYLKVLIDNKHLLSEFYEPEALMMEEEGMVIVGLLVGLNVLDANLCLKGEDLDSQVGVIDFSLYLKDVQDLDGGKEHERITDVLDQKNYVEELNRHLSCTVGDLQTKIDGLEKTNSKLQEEEERMKGQDKGGLSRGRELAASCPAVSLLDTSCLLLAGGGCSALLRLSTAFSCNRPNLLTSRRTAAVKRTK

SEQ ID NO: 99107 - protein, 138 aa, Homo sapiens
MDSWFILVLLGSGLICVSANNATTVAPSVGITRLINSSTAEPVKEEAKTSNPTSSLTSLSVAPTFSPNITLGPTYLTTVNSSDSDNGTTRTASTNSIGITISPNGTWLPDNQFTDARTEPWEGNSSTAATTPETFPPS

SEQ ID NO: 99108 - protein, 49 aa, Homo sapiens
MRDPDDQYKLTEDTRQLGLVVCRGTSVVLICPQDGMEAIPNPFIQQQDA

SEQ ID NO: 99109 - protein, 16 aa, Homo sapiens
MNIFDRKINFDALLKF

SEQ ID NO: 99110 - protein, 980 aa, Homo sapiens
DPLRCCLAVGARAGVVPSQLRVHRLTATSAEITWVPGNSNLAHAIYLNGEECPPASPSTYWATFCHLRPGTPYQAQVEAQLPPQGPWEPGWERLEQRAATLQFTTLPAGPPDAPLDVQIEPGPSPGILIISWLPVTIDAAGTSNGVRVTGYAIYADGQKIMEVASPTAGSVLVELSQLQLLQVCREVVVRTMSPHGESADSIPAPITPALAPASLPARVSCPSPHPSPEARAPLASASPGPGDPSSPLQHPAPLGTQEPPGAPPASPSREMAKGSHEDPPAPCSQEEAGAAVLGTSEERTASTSTLGEKDPGPAAPSLAKQEAEWTAGEACPASSSTQGARAQQAPNTEMCQGGDPGSGLRPRAEKEDTAELGVHLVNSLVDHGRNSDLSDIQEEEEEEEEEEEEELGSRTCSFQKQVAGNSIRENGAKSQPDPFCETDSDEEILEQILELPLQQFCSKKLFSIPEEEEEEEEDEEEEKSGAGCSSRDPGPPEPALLGLGCDSGQPRRPGQCPLSPESSRAGDCLEDMPGLVGGSSRRRGGGSPEKPPSRRRPPDPREHCSRLLSNNGPQASGRLGPTRERGGLPVIEGPRTGLEASGRGRLGPSRRCSRGRALEPGLASCLSPKCLEISIEYDSEDEQEAGSGGISITSSCYPGDGEAWGTATVGRPRGPPKANSGPKPYPRLPAWEKGEPERRGRSATGRAKEPLSRATETGEARGQDGSGRRGPQKRGVRVLRPSTAELVPARSPSETLAYQHLPVRIFVALFDYDPVSMSPNPDAGEEELPFREGQILKVFGDKDADGFYQGEGGGRTGYIPCNMVAEVAVDSPAGRQQLLQRGYLSPDILLEGSAHTTGPPPKPRRSKKAESEGPAQPCPGPPKLVPSADLKAPHSMVAAFDYNPQESSPNMDVEAELPFRAGDVITVFGGMDDDGFYYGELNGQRGLVPSNFLEGPGPEAGGLDREPRTPQAESQRTRRRRVQC

SEQ ID NO: 99111 - protein, 196 aa, Homo sapiens
MAMQKIFAREILDSRGNPTVEVDLHTAKGRFRAAVPSGASTGIYEALELRDGDKGRYLGKGVLKAVENINNTLGPALLQKKLSVVDQEKVDKFMIELDGTENKSKFGANAILGVSLAVCKAGAAEKGVPLYRHIADLAGNPDLILPVPAFNVINGGSHAGNKLAMQEFMILPVGASSFKEAMRIGAEVYHHLKGVI

SEQ ID NO: 99112 - protein, 425 aa, Homo sapiens
MYSSSSCKLPSLSPVARSFSACSVGLGRSSYRATSCLPALCLPAGGFATSYSGGGGWFGEGILTGNEKETMQSLNDRLAGYLEKVRQLEQENASLESRIREWCEQQVPYMCPDYQSYFRTIEELQKKTLCSKAENARLVVEIDNAKLAADDFRTKYETEVSLRQLVESDINGLRRILDDLTLCKSDLEAQVESLKEELLCLKKNHEEEVNSLRCQLGDRLNVEVDAAPPVDLNRVLEEMRCQYETLVENNRRDAEDWLDTQSEELNQQVVSSSEQLQSCQAEIIELRRTVNALEIELQAQHSMRDALESTLAETEARYSSQLAQMQCMITNVEAQLAEIRADLERQNQEYQVLLDVRARLECEINTYRGLLESEDSKLPCNPCAPDYSPSKSCLPCLPAASCGPSAARTNCSPRPICVPCPGGRF

SEQ ID NO: 99113 - protein, 118 aa, Homo sapiens
MSWQSERQIPFGDVRLPPPADYNKEITEGDEVEVYSRANEQEPCGWWLARVRMMKGDFYVIEYAACDATYNEIVTLERLRPVNPNPLATKGSFFKVTMAVPEDLREACSNENVHKEFK

SEQ ID NO: 99114 - protein, 983 aa, Homo sapiens
MTEHKMSVEEVCRKYNTDCVQGLTHSKAQEILARDGPNALTPPPTTPEWVKFCRQLFGGFSILLWIGAILCFLAYGIQAGTEDDPSGDNLYLGIVLAAVVIITGCFSYYQEAKSSKIMESFKNMVPQQALVIREGEKMQVNAEEVVVGDLVEIKGGDRVPADLRIISAHGCKVDNSSLTGESEPQTRSPDCTHDNPLETRNITFFSTNCVEGTARGVVVATGDRTVMGRIATLASGLEVGKTPIAIEIEHFIQLITGVAVFLGVSFFILSLILGYTWLEAVIFLIGIIVANVPEGLLATVTVCLTLTAKRMARKNCLVKNLEAVETLGSTSTICSDKTGTLTQNRMTVAHMWFDNQIHEADTTEDQSGTSFDKSSHTWVALSHIAGLCNRAVFKGGQDNIPVLKRDVAGDASESALLKCIELSSGSVKLMRERNKKVAEIPFNSTNKYQLSIHETEDPNDNRYLLVMKGAPERILDRCSTILLQGKEQPLDEEMKEAFQNAYLELGGLGERVLGFCHYYLPEEQFPKGFAFDCDDVNFTTDNLCFVGLMSMIDPPRAAVPDAVGKCRSAGIKVIMVTGDHPITAKAIAKGVGIISEGNETVEDIAARLNIPVSQVNPRDAKACVIHGTDLKDFTSEQIDEILQNHTEIVFARTSPQQKLIIVEGCQRQGAIVAVTGDGVNDSPALKKADIGVAMGIAGSDVSKQAADMILLDDNFASIVTGVEEGRLIFDNLKKSIAYTLTSNIPEITPFLLFIMANIPLPLGTITILCIDLGTDMVPAISLAYEAAESDIMKRQPRNPRTDKLVNERLISMAYGQIGMIQALGGFFSYFVILAENGFLPGNLVGIRLNWDDRTVNDLEDSYGQQWTYEQRKVVEFTCHTAFFVSIVVVQWADLIICKTRRNSVFQQGMKNKILIFGLFEETALAAFLSYCPGMDVALRMYPLKPSWWFCAFPYSFLIFVYDEIRKLILRRNPGGWVEKETYY

SEQ ID NO: 99115 - protein, 25 aa, Homo sapiens
EIPERPHSQQVGELLFDARQLASGL

SEQ ID NO: 99116 - protein, 61 aa, Homo sapiens
ALRVTRVSRFGLRTNAAFLAAACSPCLACGSLPSGRGPQERFGEEGGRGLTKRAPRWAQAW

SEQ ID NO: 99117 - protein, 36 aa, Homo sapiens
MIEVVCNDRLGKKVRVKCTRFLRTTCLWGTMKSTMG

SEQ ID NO: 99118 - protein, 131 aa, Homo sapiens
MTVGRRLPTALHGACQEAWPWRCCCCPGWHWAPAAWREQTPERRGKPRAQRARPPVSAATMTTRMSSASSAAPGTSRACLMESRAAPKPCGWTATTSRPSPRQPSRTSPAWASSTCRAASWAAWSHRRCWA

SEQ ID NO: 99119 - protein, 92 aa, Homo sapiens
KKEKSCHRPSSPVPLVSDFESLGGSESSGQQNQKIPQLPSSPENLVSEIPPPQLGYAVSDENLTLGKKAELQHFPGIWKVLNSEMVLFLQIC

SEQ ID NO: 99120 - protein, 133 aa, Homo sapiens
MLDHEQVTPEDPGAQFLIRTGSVGRNRAEASLERAQNLNPMVDVKVDTEDIEKKPESFFTQFDAVCLTCCSRDVIVKVDQICHKNSIKFFTGDVFGYHGYTFANLGEHEFVEEKTKVAKVSQGVEDGPDTKRA

SEQ ID NO: 99121 - protein, 633 aa, Homo sapiens
MAGAQTLLTFRDVAIEFSLEEWKCLDLAQQNLYRDVMLENYRNLFSVGLTVCKPGLITCLEQRKEPWNVKRQEAADGHPEMGFHHATQACLELLGSSDLPASASQSAGITGVNHRAQPGLNVSVDKFTALCSPGVLQTVKWFLEFRCIFSLAMSSHFTQDLLPEQGIQDAFPKRILRGYGNCGLDNLYLRKDWESLDECKLQKDYNGLNQCSSTTHSKIFQYNKYVKIFDNFSNLHRRNISNTGEKPFKCQECGKSFQMLSFLTEHQKIHTGKKFQKCGECGKTFIQCSHFTEPENIDTGEKPYKCQECNNVIKTCSVLTKNRIYAGGEHYRCEEFGKVFNQCSHLTEHEHGTEEKPCKYEECSSVFISCSSLSNQQMILAGEKLSKCETWYKGFNHSPNPSKHQRNEIGGKPFKCEECDSIFKWFSDLTKHKRIHTGEKPYKCDECGKAYTQSSHLSEHRRIHTGEKPYQCEECGKVFRTCSSLSNHKRTHSEEKPYTCEECGNIFKQLSDLTKHKKTHTGEKPYKCDECGKNFTQSSNLIVHKRIHTGEKPYKCEECGRVFMWFSDITKHKKTHTGEKPYKCDECGKNFTQSSNLIVHKRIHTGEKPYKCEKCGKAFTQFSHLTVHESIHT

SEQ ID NO: 99122 - protein, 273 aa, Homo sapiens
MPGLSCRFYQHKFPEVEDVVMVNVRSIAEMGAYVSLLEYNNIEGMILLSELSRRRIRSINKLIRIGRNECVVVIRVDKEKGYIDLSKRRVSPEEAIKCEDKFTKSKTVYSILRHVAEVLEYTKDEQLESLFQRTAWVFDDKYKRPGYGAYDAFKHAVSDPSILDSLDLNEDEREVLINNINRRLTPQAVKIRADIEVACYGYEGIDAVKEALRAGLNCSTENMPIKINLIAPPRYVMTTTTLERTEGLSVLSQAMAVIKEKIEEKRGVFNVQM

SEQ ID NO: 99123 - protein, 44 aa, Homo sapiens
MSTSWSDRLQNAADMPANMDKHALKKYRREAYHRRASVTPSRLE

SEQ ID NO: 99124 - protein, 547 aa, Homo sapiens
SELPYVLEMVAELAGQQDPGLGAFSCQEARRAWLDRHGNLDEAVEECVRTRRRKVQELQSLGFGPEEGSLQALFQHGGDVSRALTELQRQRLEPFRQRLWDSGPEPTPSWDGPDKQSLVRRLLAVYALPSWGRAELALSLLQETPRNYELGDVVEAVRHSQDRAFLRRLLAQECAVCGWALPHNRMQALTSCECTICPDCFRQHFTIALKEKHITDMVCPACGRPDLTDDTQLLSYFSTLDIQLRESLEPDAYALFHKKLTEGVLMRDPKFLWCAQCSFGFIYEREQLEATCPQCHQTFCVRCKRQWEEQHRGRSCEDFQNWKRMNDPEYQAQGLAMYLQENGIDCPKCKFSYALARGGCMHFHCTQCRHQFCSGCYNAFYAKNKCPEPNCRVKKSLHGHHPRDCLFYLRDWTALRLQKLLQDNNVMFNTEPPAGARAVPGGGCRVIEQKEVPNGLRDEACGKETPAGYAGLCQAHYKEYLVSLINAHSLDPATLYEVEELETATERYLHVRPQPLAGEDPPAYQARLLQKLTEEVPLGQSIPRRRK

SEQ ID NO: 99125 - protein, 51 aa, Homo sapiens
  MOD_RES (1)..(1): Any amino acid
XPAREEEAAPGGPGEHSLPAPGGQGLGPAPPGSPEEGRGGSCRHPHTDSES

SEQ ID NO: 99126 - protein, 38 aa, Homo sapiens
  MOD_RES (1)..(1): Any amino acid
XVFGVLWITVLLFFWVTKRKLEVPTGPEVQTPKGSSQS

SEQ ID NO: 99127 - protein, 145 aa, Homo sapiens
MEELLRRELGCSSVRATGHSGGGCISQGRSYDTDQGRVFVKVNPKAEARRMFEGEMASLTAILKTNTVKVPKPIKVLDAPGGGSVLVMEHMDMRHLSSHAAKLGAQLADLHLDNKKLGEMRLKEAGTVEHNALSGSREFSGILIC

SEQ ID NO: 99128 - protein, 291 aa, Homo sapiens
QTYRPLSKSHSDNSPNAFKDASSPVPPPHVPPPVPPLRPRDRSSTEKHDWDPPDRKVDTRKFRSEPRSIFEYEPGKSSILQHERPPPKKPLDYVQDHSSGVFNEASLYQSSIDRSLERPMSSASMASDFRKRRKSEPAVGPPRGLGDQSASRTSPGRVDLPGSSTTLTKSFTSSSPSSPSRAKDRESPRSYSSTLTDMGRSAPRERRGTPEKEKLPAKAVYDFKAQTSKELSFKKGDTVYILRKIDQNWYEGEHHGRVGIFPISYVEKLTPPEKAQPARPPPPAQPGEIGE

SEQ ID NO: 99129 - protein, 65 aa, Homo sapiens
EPERGSEKKTSGPLSPPTGPPGPAPAGPAVRLGSVPYSLLFRVLLQCLKQGPEGPVLTPPLLAGV

SEQ ID NO: 99130 - protein, 122 aa, Homo sapiens
CHPYFFLPLFCPQLPAESLEASALPPAVGDSGRYPLYQLLNCGRGNSCGAIHPDIAHMERLLQQAMAERERLLKAREGTRRGTEGSSGPAVPAITAPPTPPHPPGPRILDLRQHLEGWGHNP

SEQ ID NO: 99131 - protein, 22 aa, Homo sapiens
MWDLVLEDRRMNVSRQGVDQAR

SEQ ID NO: 99132 - protein, 29 aa, Homo sapiens
MLHRVDGLVSQGQDPSGRILAVTDFEPTQ

SEQ ID NO: 99133 - protein, 287 aa, Homo sapiens
MYCDNRNLKYLPFVPSRMKYVYFQNNQITSIQEGVFDNATGLLWIALHGNQITSDKVGRKVFSKLRHLERLYLDHNNLTRMPGPLPRSLRELHLDHNQISRVPNNALEGLENLTALYLQHNEIQEVGSSMRGLRSLILLDLSYNHLRKVPDGLPSALEQLYMEHNNVYTVPDSYFRGAPKLLYVRLSHNSLTNNGLASNTFNSSSLLELDLSYNQLQKIPPVNTNLENLYLQGNRINEFSISSFCTVVDVVNFSKLQVLRLDGNEIKRSAMPADAPLCLRLASLIEI

SEQ ID NO: 99134 - protein, 157 aa, Homo sapiens
MNSSPAGTPSPQPSRANGNINLGPSANPNAQPTDFDFLKVIGKGNYGKVLLAKRKSDGAFYAVKVLQKKSILKKKESHIMAERSVLLKNVRHPFLVGLRYSFQTPEKLYFVLDYVNGGELFFHLQRERRFLEPRARFYAAEVASAIGYLHSLNIIYR

SEQ ID NO: 99135 - protein, 86 aa, Homo sapiens
MALRHLALLAGLLVGVASKSMENTAQLPECCVDVVGVNASCPGASLCGPGCYRRWNADGSASCVRCGNGTLPAYNGSECRSFAGPG

SEQ ID NO: 99136 - protein, 155 aa, Homo sapiens
MFCPLKLILLPVLLDYSLGLNDLNVSPPELTVHVGDSALMGCVFQSTEDKCIFKIDWTLSPGEHAKDEYVLYYYSNLSVPIGRFQNRVHLMGDILCNDGSLLLQDVQEADQGTYICEIRLKGESQVFKKAVVLHVLPEEPKELMVHVGGLIQMGC

SEQ ID NO: 99137 - protein, 175 aa, Homo sapiens
MALPQIFGLSPRLKCSGVTSAHCNLHFPGSSNSPASAFQVAGTTDISSKCMMKTFFSTGQGNTEAFHTGTLQRQASHHIGDFCFQKIEKDIHGFQFQWKEDETNDHAAPMTEIKELTGSTGQHDQRHAGNKHIKDQLGLSFHSHLPELHIFQPEGKIGNQVEKSINNASSVSTSQ

SEQ ID NO: 99138 - protein, 230 aa, Homo sapiens
MSPKRIAKRRSPPADAIPKSKKVKVSHRSHSTEPGLVLTLGQGDVGQLGLGENVMERKKPALVSIPEDVVQAEAGGMHTVCLSKSGQVYSFGCNDEGALGRDTSVEGSEMVPGKVELQEKVVQVSAGDSHTAALTDDGRVFLWGSFRDNNGVIGLLEPMKKSMVPVQVQLDVPVVKVASGNDHLVMLTADGDLYTLGCGEQGQLGRVPELFANRGGRQGLERLLVPKCVM

SEQ ID NO: 99139 - protein, 661 aa, Homo sapiens; identical to SEQ ID NO: 55983

SEQ ID NO: 99140 - protein, 38 aa, Homo sapiens
MSASAVFILDVKGKRDPAMLPKLVSNSWPQGILLPWSS

SEQ ID NO: 99141 - protein, 340 aa, Homo sapiens
MVPQVKPGPDGGVLRRASCKSTHDLQSPPNKREKNCTHGVQARPEQRHSCHLVCDSSDGLLLGGWERYTEVAKRGGQHTLPALSRATAPTDPNYIILAPLNPGSQLLRPVYQEDTIPEESGSPSKGKSYTGLGKKSRLMKTVQTMKGHGNYQNCPVVRPHATHSSYGTYVTLAPKVLVFPVFVQPLDLCNPARTLLLSEELLLYEGRNKAAEVTLFAYSDLLLFTKEDEPGRCDVLRNPLYLQSVKLQEGSSEDLKFCVLYLAEKAECLFTLEAHSQEQKKRVCWCLSENIAKQQQLAASPPDSKKLHPFGSLQQEMGPVNSTNATQDRSFTSPGQTLIG

SEQ ID NO: 99142 - protein, 78 aa, Homo sapiens
MVLILGRRLNREDLGVRDSPATKRKVFEMDPKSLTGHEFFDFSSGSSHAENILQIFNEFRDSRLFTDVIICVEGKEFP

SEQ ID NO: 99143 - protein, 237 aa, Homo sapiens
MSWLASYLADADCLPSAAQIRSAYNEPLTPSSNTSLSPVGSPVSEIAFEKPNLPSAADWSEFLSASTSEKVENEFAQLTLSDHEQRELYEAARLVQTAFRKYKGRPLREQQEVAAAVIQRCYRKYKQYALYKKMTQAAILIQSKFRSYYEQKKFQQSRRAAVLIQKYYRSYKKCGKRRQARRTAVIVQQKLRSSLLTKKQDQAARKIMRFLRRCRHRVKELKKAKELEDIQQHPLAM

SEQ ID NO: 99144 - protein, 343 aa, Homo sapiens
  MOD_RES (1)..(1): Any amino acid
XMLSGRSPFYEPDPQETEARIVGGRFDAFQLYPNTSQSATLFLRKVLSVHPWSRPSLQDCLAHPWLQDAYLMKLRRQTLTFTTNRLKEFLGEQRRRRAEAATRHKMSKAAPAKKPVAVAPAPGCTLDINDPQVQSAAIRIQASYRGHRSRKELREKGPPRVLEPLKDVVLIEGSAAKLTCRISAFPDPFIRWSKDGKELRDGPKYRYVFEDPDVVALVVRDGELADLGQYSINVTNPFGQCSDSARILVEVPTKIQKGPDNTKARKGTTVTLTAEILGEPAPDVGWTKDGEDIEEDDRVFFEIGSTTTTLTIRRATPQDSGKYEVYVENSLGMDQSFARVDVA

SEQ ID NO: 99145 - protein, 85 aa, Homo sapiens
  MOD_RES (1)..(1): Any amino acid
XSTNNMSDPRRPNKVLRYKPPPSECNPALDDPTPDYMNLLGMIFSMCGLMLKLKWCAWVAVYCSFISFANSRSSEDTKQMMSSFM

SEQ ID NO: 99146 - protein, 35 aa, Homo sapiens
MVYRDDYFIRHSISVSAVIVRAWITHKYSGRDWNV

SEQ ID NO: 99147 - protein, 205 aa, Homo sapiens
  MOD_RES (1)..(1): Any amino acid
XSALPRGLGCSLLFIPLGLVDRRTHAPTVLALGFMALYSLLPHKELRFIIYAFPMLNITAARGCSYLLNNYKKSWLYKAGSLLVIGHLVVNAAYSATALYVSHFNYPGGVAMQRLHQLVPPQTDVLLHIDVAAAQTGVSRFLQVNSAWRQSWCFWRGSPGRPEGDQAALSSHRPSRSCYHYQFLAQFQHNYDNSEKQVKGLGTCL

SEQ ID NO: 99148 - protein, 285 aa, Homo sapiens
MALKVLGAHEVPSRNIFSEQTIPPSAKYGGRHTVTMIPGDGIGPELMLHVKSVFRHACVPVDFEEVHVSSNADEEDIRNAIMAIRRNRVALKGNIETNHNLPPSHKSRNNILRTSLDLYANVIHCKSLPGVVTRHKDIDILIVRENTEGEYSSLEHESVAGVVESLKIITKAKSLRIAEYAFKLAQESGRKKVTAVHKANIMKLGDGLFLQCCREVAARYPQITFENMIVDNTTMQLVSRPQQFDVMVMPNLYGNIVNNVCAGLVGGPGLVAGANYGHVYAVFET

SEQ ID NO: 99149 - protein, 132 aa, Homo sapiens
MRSAVCQFPRHRLAAGRPHPESGRGNASESEEDRSAGSVESPSVSSTHRVSDPKFHPLHSKIIIIKKGHAKDSQRYKVDYESQSTDTQNFSSESKRETEYGPCRREMEDTLNHLKFLNVLSPRGVHIPNCDK

SEQ ID NO: 99150 - protein, 233 aa, Homo sapiens
MLPKRRRARVGSPSGDAASSTPPSTRFPGVAIYLVEPRMGRSRRAFLTGLARSKGFRVLDACSSEATHVVMEETSAEEAVSWQERRMAAAPPGCTPPALLDISWLTESLGAGQPVPVECRHRLEELLEHGVCEEVERVRRSERYQTMKLFTQIFGVGVKTADRWYREGLRTLDDLREQPQKLTQQQKAGLQHHQDLSTPVLRSDVDALQQVVEEAVGQALPGATVTLTGGFRR

SEQ ID NO: 99151 - protein, 321 aa, Homo sapiens; identical to SEQ ID NO: 49154

SEQ ID NO: 99152 - protein, 165 aa, Homo sapiens
MNSSPAGTPSPQPSRANGNINLGPSANPNAQPTDFDFLKVIGKGNYGKVLLAKRKSDGAFYAVKQSHIMAERSVLLKNVRHPFLVGLRYSFQTPEKLYFVLDYVNGGELFFHLQRERRFLEPRARFYAAEVASAIGYLHSLNIIYRDLKPENILLDCQGHVVLTD

SEQ ID NO: 99153 - protein, 1194 aa, Homo sapiens
SDSNASFLRAARAGNLDKVVEYLKGGIDINTCNQNGLNALHLAAKEGHVGLVQELLGRGSSVDSATKKGNTALHIASLAGQAEVVKVLVKEGANINAQSQNGFTPLYMAAQENHIDVVKYLLENGANQSTATEDGFTPLAVALQQGHNQAVAILLENDTKGKVRLPALHIAARKDDTKSAALLLQNDHNADVQSKMMVNRTTESGFTPLHIAAHYGNVNVATLLLNRGAAVDFTARNGITPLHVASKRGNTNMVKLLLDRGGQIDAKTRDGLTPLHCAARSGHDQVVELLLERGAPLLARTKNGLSPLHMAAQGDHVECVKHLLQHKAPVDDVTLDYLTALHVAAHCGHYRVTKLLLDKRANPNARALNGFTPLHIACKKNRIKVMELLVKYGASIQAITESGLTPIHVAAFMGHLNIVLLLLQNGASPDVTNIRGETALHMAARAGQVEVVRCLLRNGALVDARAREEQTPLHIASRLGKTEIVQLLLQHMAHPDAATTNGYTPLHISAREGQVDVASVLLEAGAAHSLATKKGFTPLHVAAKYGSLDVAKLLLQRRAAADSAGKNGLTPLHVAAHYDNQKVALLLLEKGASPHATAKNGYTPLHIAAKKNQMQIASTLLNYGAETNIVTKQGVTPLHLASQEGHTDMVTLLLDKGANIHMSTKSGLTSLHLAAQEDKVNVADILTKHGADQDAHTKLGYTPLIVACHYGNVKMVNFLLKQGANVNAKTKNGYTPLHQAAQQGHTHIINVLLQHGAKPNATTANGNTALAIAKRLGYISVVDTLKVVTEEVTTTTTTITEKHKLNVPETMTEVLDVSDEEGDDTMTGDGGEYLRPEDLKELGDDSLPSSQFLDGMNYLRYSLEGGRSDSTMPSSDRSHTLSHASYLRDSAVMDDSVVIPSHQVSTLAKEAERNSYRLSWGTENLDNVALSSSPIHSGFLVSFMVDARGGAMRGCRHNGLRIIIPPRKCTAPTRVTCRLVKRHRLATMPPMVEGEGLASRLIEVGPSGAQFLGKLHLPTAPPPLNEGESLVSRILQLGPPGTKFLGPVIVEIPHFAALRGKERELVVLRSENGDSWKEHFCDYTEDELNEILNGMDEVLDSPEDLEKKRICRIITRDFPQYFAVVSRIKQDSNLIGPEGGVLSSTVVPQVQAVFPEGALTKRIRVGLQAQPMHSELVKKILGNKATFSPIVTLE

SEQ ID NO: 99154 - protein, 241 aa, Homo sapiens
MALELYMDLLSAPCRAVYIFSKKHDIQFNFQFVDLLKGHHHSKGYIDINPLRKLPSLKDGKFILSESAAILYYLCRKYSAPSHWCPPDPHARARVDEFVAWQHTAFQLPMKKIVWLKLLIPKITGKEVSAEKMEHAVEEVKNSLQLFEEYFLQDKMFITGNQISLADLVAVVEMMQPMAANYNVFLNSSKLAEWRMRVELNIGCGLFREAHDRLMQLADWDFSTLDPMVTRKICEFREKYL

SEQ ID NO: 99155 - protein, 40 aa, Homo sapiens
VVTGSRQPARKGGRSMLRTTVRPSLLPVMTLMHSLCRDDC

SEQ ID NO: 99156 - protein, 236 aa, Homo sapiens [sequence omitted]

SEQ ID NO: 99157 - protein, 67 aa, Homo sapiens
MPLYDNQKARSVMNECERHVIFARTDADAPPPPEDWEEHVNRLVMSQCCAVLLWTSVQGECGRLWQV

SEQ ID NO: 99158 - protein, 185 aa, Homo sapiens
SRCSGDSVPGTDGCSIHKRVFIEYTMDVFFRQTWTDERLKFGGPTEILSLNNLMVSKIWTPDTFFRNGKKSIAHNMTTPNKLFRIMQNGTILYTMRLTINADCPMRLVNFPMDGHACPLKFGSYAYPKSEIIYTWKKGPLYSVEVPEESSSLLQYDLIGQTVSSETIKSNTGEYVIMTVYFHLQR

SEQ ID NO: 99159 - protein, 54 aa, Homo sapiens
MKMHAEKKHKCSKCSNSYGTEWDLKRHAEDCGKTFRCTCGCPYASRTALQSHIY

SEQ ID NO: 99160 - protein, 516 aa, Homo sapiens
MAAALRVAAVGARLSVLASGLRAAVRSLCSQATSVNERIENKRRTALLGGGQRRIDAQHKRGKLTARERISLLLDPGSFVESDMFVEHRCADFGMAADKNKDFTVFGGSLSGAHAQKICKIMDQAITVGAPVIGLNDSGGARIQEGVESLAGYADIFLRNVTASGVIPQISLIMGPCAGGAVYSPALTDFTFMVKDTSYLFITGPDVVKSVTNEDVTQEELGGAKTHTTMSGVAHRAFENDVDALCNLRDFFNYLPLSSQDPAPVRECHDPSDRLVPELDTIVPLESTKAYNMVDIIHSVVDEREFFEIMPNYAKNIIVGFARMNGRTVGIVGNQPKVASGCLDINSSVKGARFVRFCDAFNIPLITFVDVPGFLPGTAQEYGGIIRHGAKLLYAFAEATVPKVTVITRKAYGGAYDVMSSKHLCGDTNYAWPTAEIAVMGAKGAVEIIFKGHENVEAAQAEYIEKFANPFPAAVRGFVDDIIQPSSTRARICCDLDVLASKKVQRPWRKHANIPL

SEQ ID NO: 99161 - protein, 63 aa, Homo sapiens
MIPGGLSEAKPATPEIQEIVDKVKPQLEEKTNETYGKLEAVQYKTQVVAGTNYYIKVRVQHLL

SEQ ID NO: 99162 - protein, 961 aa, Homo sapiens
MDSTLTASEIRQRFIDFFKRNEHTYVHSSATIPLDDPTLLFANAGMNQFKPIFLNTIDPSHPMAKLSRAANTQKCIRAGGKHNDLDDVGKDVYHHTFFEMLGSWSFGDYFKELACKMALELLTQEFGIPIERLYVTYFGGDEAAGLEADLECKQIWQNLGLDDTKILPGNMKDNFWEMGDTGPCGPCSEIHYDRIGGRDAAHLVNQDDPNVLEIWNLVFIQYNREADGILKPLPKKSIDTGMGLERLVSVLQNKMSNYDTDLFVPYFEAIQKGTGARPYTGKVGAEDADGIDMAYRVLADHARTITVALADGGRPDNTGRGYVLRRILRRAVRYAHEKLNASRGFFATLVDVVVQSLGDAFPELKKDPDMVKDIINEEEVQFLKTLSRGRRILDRKIQSLGDSKTIPGDTAWLLYDTYGFPVDLTGLIAEEKGLVVDMDGFEEERKLAQLKSQGKGAGGEDLIMLDIYAIEELRARGLEVTDDSPKYNYHLDSSGSYVFENTVATVMALRREKMFVEEVSTGQECGVVLDKTCFYAEQGGQIYDEGYLVKKTEFTVKNAQVRGGYVLHIGTIYGDLKVGDQVWLFIDEPRRRPIMSNHTATHILNFALRSVLGEADQKGSLVAPDRLRFDFTAKGAMSTQQIKKAEEIANEMIEAAKAVYTQDCPLAAAKAIQGLRAVFDETYPDPVRVVSIGVPVSELLDDPSGPAGSLTSVEFCGGTHLRNSSHAGAFVIVTEEAIAKGIRRIVAVTGAEAQKALRKAESLKKCLSVMEAKVKAQTAPNKDVQREIADLGEALATAVIPQWQKDELRETLKSLKKVMDDLDRASKADVQKRVLEKTKQFIDSNPNQPLVILEMESGASAKALNEALKLFKMHSPQTSAMLFTVDNEAGKITCLCQVPQNAANRGLKASEWVQQVSGLMDGKGGGKDVSAQATGKNVGCLQEALQLATSFAQLRLGDVKN

SEQ ID NO: 99163 - protein, 321 aa, Homo sapiens
MPRVKAAQAGRQSSAKRHLAEQFAVGEIITDMAKKEWKVGLPIGQGGFGCIYLADMNSSESVGSDAPCVVKVEPSDNGPLFTELKFYQRAAKPEQIQKWIRTRKLKYLGVPKYWGSGLHDKNGKSYRFMIMDRFGSDLQKIYEANAKRFSRKTVLQLSLRILDILEYIHEHEYVHGDIKASNLLLNYKNPDQVYLVDYGLAYRYCPEGVHKEYKEDPKRCHDGTIEFTSIDAHNGVAPSRRGDLEILGYCMIQWLTGHLPWEDNLKDPKYVRDSKIRYRENIASLMDKCFPEKNKPESPCQLHTHSPTSKFAGTLGLNLTL

SEQ ID NO: 99164 - protein, 373 aa, Homo sapiens
DSVYSKQFQSSAAVCQAVLYEILYKDVFVVDEEELKTAIKLFRSGSKKNRNNAVTGSEDAHTDYKSSNQNRMEEWGACYNAENIPEGYNKGTEETKVCLESEGRYYNAHIQEVGNENNSVTVFIEELAEKHVVPLANLKPVTQVMSVPAWNAMPSRKGRGYQKMPGGYVPEIVISEMDIKQQKKMFKKIRGKEVYMTMAYGKGDPLLPPRLQHSMHYGHDPPMHYSQTAGNVMSNEHFHPQHPSPRQGRGYGMPRNSSRFINRHNMPGPKVDFYPGPGKRCCQSYDNFSYRSRSFRRSHRQMSCVNKESQYGFTPGNGQMPRGLEETITFYEVEEGDETAYPTLPNHGGPSTMVPATSGYCVGRRGHSSGKQT

SEQ ID NO: 99165 - protein, 353 aa, Homo sapiens
MRLAGRQVPEQRSPPPPGLGSARPGSPAVSCGAAAMAPRRARGCRTLGLPALLLLLLLRPPATRDARDRLAVLAGRSRISESFNHEVQTHEACVRLRTMENCPQCHHHRTSRQQAGITCPPPMSVEHADIWVKSYSLYSRERYICNSGFKRKAGTSSLTECVLNKATNVAHWTTPSLKCIRDPALVHQRPAPPSTVTTAGVTPQPESLSPSGKEPAASSPSSNNTAATTAAIVPGSQLMPSKSPSTGTTEISSHESSHGTPSQTTAKNWELTASASHQPPGVYPQGHSDTTVAISTSTVLLCGLSAVSLLACYLKSRQTPPLASVEMEAMEALPVTWGTSSRDEDLENCSHHL

SEQ ID NO: 99166 - protein, 41 aa, Homo sapiens
MTRTPVGSARTRPKPRKLGPQRGKALQASSRLSEEQNPQPW

SEQ ID NO: 99167 - protein, 58 aa, Homo sapiens
MGLEDEQKMLTESGDPEEEEEEEEELVVRTVSGSPNNSERAMRAVGEMCKGPGAARAL

SEQ ID NO: 99168 - protein, 169 aa, Homo sapiens
MSSAPRRPAKGADSFCTPEPESLGPGTPGFPEQEEDELHRTLGVERFEEILQEAGSRGGEEPGRSYGEEDFEYHRQSSHHIHHPLSTHLPPDARRRKTPQGPGRKPRRRPGASPTGETPTIEEGEEDEDEASEAEGARALTQPSPVSTPSSVQFFLQEDDSADRKAERT

SEQ ID NO: 99169 - protein, 198 aa, Homo sapiens
EDGGVMIIGYEMYRNLAQGRNVKSRKLKEIFNKALVDPGPDFVVCDEGHILKNEASAVSKAMNSIRSRRRIILTGTPLQNNLIEYHCMVNFIKENLLGSIKEFRNRFINPIQNGQCADSTMVDVRVMKKRAHILYEMLAGCVQRKDYTALTKFLPPKHEYVLAVRMTSIQCKLYQYYLDHLTVLHLNKMGMLKSIKYF

SEQ ID NO: 99170 - protein, 207 aa, Homo sapiens
MIAAPEIPTDFNLLQESETHFSSDTDFEDIEGKNQKQGKGKTCKKGKKGPAEKGKGGNGGGKPPSGPNRMNGHHQQNGVENMMLFEVVKMGKSAMQSVVDDWIESYKHDRDIALLDLINFFIQCSGCKGVVTAEMFRHMQNSEIIRKMTEEFDEDSGDYPLTMAGPQWKKFKSSFCEFIGVLVRQCQYSIIYDEYMMDTVISLLTGL

SEQ ID NO: 99171 - protein, 128 aa, Homo sapiens
  MOD_RES (1)..(1): Any amino acid
XRTFLKAFPLMGETQERERVLTHFSRRYCQCNPDDSTSEDGIHTLTCALMLLNTDLHGHVNIGKKMSCQQFIANLDQLNDGQDFAKDLLKTLYNSIKNEKLEWAIDEDELRKSLSELVDDKFGTGTKK

SEQ ID NO: 99172 - protein, 7 aa, Homo sapiens
MTQQPLR

SEQ ID NO: 99173 - protein, 144 aa, Homo sapiens
MPLPEPSEQEGESVKASQEPSPKPGTEVIPAAPRKPRKFSKLVLLTASKDSTKVAGAKRKGVHCVMSLGVPGPATLAKALLQTHPEAQRAIEAAPQEPEQKRSRQDPGEAPQRPPRTARHLPGWPPQPRWLHQALLPGMRVLVP

SEQ ID NO: 99174 - protein, 250 aa, Homo sapiens
MIPRKRYGSKNTDQGVYLGLSKTQVLSPATAGSSSSDIAPLPPPVTLVPPPPDTMSCRDRTQEFLSACKSLQTRQNGIQTNKPALRAVRQRSEFTLMAKRIGKDLSNTFAKLEKLTILAKRKSLFDDKAVEIEELTYIIKQDINSLNKQIAQLQDFVRAKGSQSGRHLQTHSNTIVVSLQSKLASMSNDFKSVLEVRTENLKQQRSRREQFSRAPVSALPLAPNHLGKSQAVVLWFWGQSPMPPRMSPST

SEQ ID NO: 99175 - protein, 69 aa, Homo sapiens
AGLSPEPRAGVGSEFPAWFLGGSSQRRNMALLGSRAELEADEDVFEDALETISIWLKKKSGRREGKTSS

SEQ ID NO: 99176 - protein, 155 aa, Homo sapiens
MDFRTACEETKTGICLLQDGNQEPFKVRLHLAKDILMIQEQDVICVSGEPFYSGERTVTIRRQTVGGFGLSIKGGAEHNIPVVVSKISKEQRAELSGLLFIGDAILQINGINVRKCRHEEVVQVLRNAGEEVTLTVSFLKRAPAFLKLPLNEDCA

SEQ ID NO: 99177 - protein, 70 aa, Homo sapiens
MKLLENSSFEAINSQLTVETGDAHIIGRIESYSCKMAGDDKHMFKQFCQEGQPHVLEALSPPQTSGLSPS

SEQ ID NO: 99178 - protein, 53 aa, Homo sapiens
  MOD_RES (1)..(1): Any amino acid
XTFDERFGLEDPEDDICKYDFVEVEEPSDGTILGRWCGSGFCIHYNIVMPNLP

SEQ ID NO: 99179 - protein, 260 aa, Homo sapiens
  MOD_RES (1)..(1): Any amino acid
XDLHQKEIQGFFNIPVDNLRASPFLLQYIQEEIPDYRNAVIVAKSPASAKRAQSFAERLRLGIAVIHGEAQDAESDLVDGRHSPPMVRSVAAIHPSLEIPTWSAVVQSWHTATSASQVQAILLGSWDYRYMPPCPVLIPKEKPPITVVGDVGGRIAIIVDDIIDDVDSFLAAAETLKERGAYKIFVMATHGLLSSDAPRRIEESAIDEVVVTNTIPHEVQKLQCPKIKTVDISMILSEAIRRIHNGESMSYLFRNIGLDD

SEQ ID NO: 99180 - protein, 189 aa, Homo sapiens
  MOD_RES (1)..(1): Any amino acid
XPPYDPIRMEFENKEDLSGTQAGLNVIKEAEAQLWWAAKELRRTKKLSDYVGKNEKTKIIAKIQQPLQQQIIRLHQELGRQKSLWADVHGKLRSHIDALREQNMELREKLRALQLQRWKARKKSAASPHAGQESHTLALEPAFGKISPLSADEETIPKYAGHKNQSATLLGQRSSSNNSAPPKTEAPQS

SEQ ID NO: 99181 - protein, 717 aa, Homo sapiens
MASTRCKLARYLEDLEDVDLKKFKMHLEDYPPQKGCIPLPRGQTEKADHVDLATLMIDFNGEEKAWAMAVWIFAAINRRDLYEKAKRDEPKWGSDNARVSNPTVICQEDSIEEEWMGLLEYLSRISICKMKKDYRKKYRKYVRSRFQCIEDRNARLGESVSLNKRYTRLRLIKEHRSQQEREQELLAIGKTKTCESPVSPIKMELLFDPDDEHSEPVHTVVFQGAAGIGKTILARKMMLDWASGTLYQDRFDYLFYIHCREVSLVTQRSLGDLIMSCCPDPNPPIHKIVRKPSRILFLMDGFDELQGAFDEHIGPLCTDWQKAERGDILLSSLIRKKLLPEASLLITTRPVALEKLQHLLDHPRHVEILGFSEAKRKEYFFKYFSDEAQARAAFSLIQENEVLFTMCFIPLVCWIVCTGLKQQMESGKSLAQTSKTTTAVYVFFLSSLLQPRGGSQEHGLCAHLWGLCSLAADGIWNQKILFEESDLRNHGLQKADVSAFLRMNLFQKEVDCEKFYSFIHMTFQEFFAAMYYLLEEEKEGRTNVPGSRLKLPSRDVTVLLENYGKFEKGYLIFVVRFLFGLVNQERTSYLEKKLSCKISQQIRLELLKWIEVKAKAKKLQIQPSQLELFYCLYEMQEEDFVQRAMDYFPKIEINLSTRMDHMVSSFCIENCHRVESLSLGFLHNMPKEEEEEEKEGRHLDMVQCVLPSSSHAACSHG

SEQ ID NO: 99182 - protein, 8749 aa, Homo sapiens
MATSRGASRCPRDIANVMQRLQDEQEIVQKRTFTKWINSHLAKRKPPMVVDDLFEDMKDGVKLLALLEVLSGQKLPCEQGRRMKRIHAVANIGTALKFLEGRKSMHRGSPIKLVNINSTDIADGRPSIVLGLMWTIILYFQIEELTSNLPQLQSLSSSASSVDSIVSSETPSPPSKRKVTTKIQGNAKKALLKWVQYTAGKQTGIEVKDFGKSWRSGVAFHSVIHAIRPELVDLETVKGRSNRENLEDAFTIAETELGIPRLLDPEDVDVDKPDEKSIMTYVAQFLKHYPDIHNASTDGQEDDEILPGFPSFANSVQNFKREDRVIFKEMKVWIEQFERDLTRAQMVESNLQDKYQSFKHFRVQYEMKRKQIEHLIQPLHRDGKLSLDQALVKQSWDRVTSRLFDWHIQLDKSLPAPLGTIGAWLYRAEVALREEITVQQVHEETANTIQRKLEQHKDLLQNTDAHKRAFHEIYRTRSVNGIPVPPDQLEDMAERFHFVSSTSELHLMKMEFLELKYRLLSLLVLAESKLKSWIIKYGRRESVEQLLQNYVSFIENSKFFEQYEVTYQILKQTAEMYVKADGSVEEAENVMKFMNETTAQWRNLSVEVRSVRSMLEEVISNWDRYGNTVASLQAWLEDAEKMLNQSENAKKDFFRNLPHWIQQHTAMNDAGNFLIETCDEMVSRDLKQQLLLLNGRWRELFMEVKQYAQADEMDRMKKEYTDCVVTLSAFATEAHKKLSEPLEVSFMNVKLLIQDLEDIEQRVPVMDAQYKIITKTAHLITKESPQEEGKEMFATMSKLKEQLTKVKECYSPLLYESQQLLIPLEELEKQMTSFYDSLGKINEIITVLEREAQSSALFKQKHQELLACQENCKKTLTLIEKGSQSVQKFVTLSNVLKHFDQTRLQRQIADIHVAFQSMVKKTGDWKKHVETNSRLMKKFEESRAELEKVLRIAQEGLEEKGDPEELLRRHTEFFSQLDQRVLNAFLKACDELTDILPEQEQQGLQEAVRKLHKQWKDLQGEAPYHLLHLKIDVEKNRFLASVEECRTELDRETKLMPQEGSEKIIKEHRVFFSDKGPHHLCEKRLQLIEELCVKLPVRDPVRDTPGTCHVTLKELRAAIDSTYRKLMEDPDKWKDYTSRFSEFSSWISTNETQLKGIKGEAIDTANHGEVKRAVEEIRNGVTKRGETLSWLKSRLKVLTEVSSENEAQKQGDELAKLSSSFKALVTLLSEVEKMLSNFGDCVQYKEIVKNSLEELISGSKEVQEQAEKILDTENLFEAQQLLLHHQQKTKRISAKKRDVQQQIAQAQQGEGGLPDRGHEELRKLESTLDGLERSRERQERRIQVTLRKWERFETNKETVVRYLFQTGSSHERFLSFSSLESLSSELEQTKEFSKRTESIAVQAENLVKEASEIPLGPQNKQLLQQQAKSIKEQVKKLEDTLEEDIKTMEMVKTKWDHFGSNFETLSVWITEKEKELNALETSSSAMDMQISQIKVTIQEIESKLSSIVGLEEEAQSFAQFVTTGESARIKAKLTQIRRYGEELREHAQCLEGTILGHLSQQQKFEENLRKIQQSVSEFEDKLAVPIKICSSATETYKVLQEHMDLCQALESLSSAITAFSASARKVVNRDSCVQEAAALQQQYEDILRRAKERQTALENLLAHWQRLEKELSSFLTWLERGEAKASSPEMDISADRVKVEGELQLIQALQNEVVSQASFYSKLLQLKESLFSVASKDDVKMMKLHLEQLDERWRDLPQIINKRINFLQSVVAEHQQFDELLLSFSVWIKLFLSELQTTSEISIMDHQVALTRHKDHAAEVESKKGELQSLQGHLAKLGSLGRAEDLHLLQGKAEDCFQLFEEASQVVERRQLALSHLAEFLQSHASLSGILRQLRQTVEATNSMNKNESDLIEKDLNDALQNAKALESAAVSLDGILSKAQYHLKIGSSEQRTSCRATADQLCGEVERIQNLLGTKQSEADALAVLKKAFQDQKEELLKSIEDIEERTDKERLKEPTRQALQQRLRVFNQLEDELNSHEHELCWLKDKAKQIAQKDVAFAPEVDREINRLEVTWDDTKRLIHENQGQCCGLIDLMREYQNLKSAVSKVLENASSVIVTRTTIKDQEDLKWAFSKHETAKNKMNYKQKDLDNFTSKGKHLLSELKKIHSSDFSLVKTDMESTVDKWLDVSEKLEENMDRLRVSLSIWDDVLSTRDEIEGWSNNCVPQMAENISNLDNHLRAEELLKEFESEVKNKALRLEELHSKVNDLKELTKNLETPPDLQFIEADLMQKLEHAKEITEVAKGTLKDFTAQSTQVEKFINDITTWFTKVEESLMNCAQNETCEALKKVKDIQKELQSQQSNISSTQENLNSLCRKYHSAELESLGRAMTGLIKKHEAVSQLCSKTQASLQESLEKHFSESMQEFQEWFLGAKAAAKESSDRTGDSKVLEAKLHDLQNILDSVSDGQSKLDAVTQEGQTLYAHLSKQIVSSIQEQITKANEEFQAFLKQCLKDKQALQDCASELGSFEDQHRKLNLWIHEMEERFNTENLGESKQHIPEKKNEVHKVEMFLGELLAARESLDKLSQRGQLLSEEGHGAGQEGRLCSQLLTSHQNLLRMTKEKLRSCQVALQEHEALEEALQSMWFWVKAIQDRLACAESTLGSKDTLEKRLSQIQDILLMKGEGEVKLNMAIGKGEQALRSSNKEGQRVIQTQLETLKEVWADIMSSSVHAQSTLESVISQWNDYVERKNQLEQWMESVDQKIEHPLQPQPGLKEKFVLLDHLQSILSEAEDHTRALHRLIAKSRELYEKTEDESFKDTAQEELKTQFNDIMTVAKEKMRKVEEIVKDHLMYLDAVHEFTDWLHSAKEELHRWSDMSGDSSATQKKLSKIKELIDSREIGASRLSRVESLAPEVKQNTTASGCELMHTEMQALRADWKQWEDSVFQTQSCLENLVSQMALSEQEFSGQVAQLEQALEQFSALLKTWAQQLTLLEGKNTDEEIVECWHKGQEILDALQKAEPRTEDLKSQLNELCRFSRDLSTYSGKVSGLIKEYNCLCLQASKGCQNKEQILQQRFRKAFRDFQQWLVNAKITTAKCFDIPQNISEVSTSLQKIQEFLSESENGQHKLNMMLSKGELLSTLLTKEKAKGIQAKVTAAKEDWKNFHSNLHQKESALENLKIQMKDFEVSAEPIQDWLSKTEKMVHESSNRLYDLPAKRREQQKLQSVLEEIHCYEPQLNRLKEKAQQLWEGQAASKSFRHRVSQLSSQYLALSNLTKEKVSRLDRIVAEHNQFSLGIKELQDWMTDAIHMLDSYCHPTSDKSVLDSRTLKLEALLSVKQEKEIQMKMIVTRGESVLQNTSPEGIPTIQQQLQSVKDMWASLLSAGIRCKSQLEGALSKWTSYQDGVRQFSGWMDSMEANLNESERQHAELRDKTTMLGKAKLLNEEVLSYSSLLETIEVKGAGMTEHYVTQLELQDLQERYRAIQERAKEAVTKSEKLVRLHQEYQRDLKAFEVWLGQEQEKLDQYSVLEGDAHTHETTLRDLQELQVHCAEGQALLNSVLHTREDVIPSGIPQAEDRALESLRQDWQAYQHRLSETRTQFNNVVNKLRLMEQKFQQVDEWLKTAEEKKWHEEVTAYRDEVEEVGARAQEILDESHVNSRMGCQATQLTSRYQALLLQVLEQIKFLEEEIQSLEESESSLSSYSDWYGSTHKNFKNVATKIDKVDTVMMGKKLKTLEVLLKDMEKGHSLLKSAREKGERAVKYLEEGEAERLRKEIHDHMEQLKELTSTVRKEHMTLEKGLHLAKEFSDKCKALTQWIAEYQEILHVPEEPKMELYEKKAQLSKYKSLQQTVLSHEPSVKSVREKGEALLELVQDVTLKDKIDQLQSDYQDLCSIGKAMMEEIAGFEDRLNNLQMKGDTLIGQCADHLQAKLKQNVHAHLQGTKDSYSAICSTAQRMYQSLEHELQKHVSRQDTLQQCQAWLSAVQPDLEPSPQPPLSRAEAIKQVKHFRALQEQARTYLDLLCSMCDLSNASVKTTAKDIQQTEQTIEQKLVQAQNLTQGWEEIKHLKSELWIYLQDADQQLQNMKRRHSELELNIAQNMVSQVKDFVKKLQSKQASVNTIIEKVNKLTKKEESPEHKEINHLNDQWLDLCRQSNNLCLQREEDLQRTRDYHDCMNVVEVFLEKFTTEWDNLARSDAESTAVHLEALKKLALALQERKYAIEDLKDQKQKMIEHLNLDDKELVKEQTSHLEQRWFQLEDLIKRKIQVSVTNLEELNVVQSRFQELMEWAEEQQPNIAEALKQSPPPDMAQNLLMDHLAICSELEAKQMLLKSLIKDADRVMADLGLNERQVIQKALSDAQSHVNCLSDLVGQRRKYLNKALSEKTQFLMAVFQATSQIQQHERKIMFREHICLLPDDVSKQVKTCKSAQASLKTYQNEVTGLWAQGRELMKEVTEQEKSEVLGKLQELQSVYDSVLQKCSHRLQELEKNLVSRKHFKEDFDKACHWLKQADIVTFPEINLMNESSELHTQLAKYQNILEQSPEYENLLLTLQRTGQTILPSLNEVDHSYLSEKLNALPRQFNVIVALAKDKFYKVQEAILARKEYASLIELTTQSLSELEAQFLRMSKVPTDLAVEEALSLQDGCRAILDEVAGLGEAVDELNQKKEGFRSTGQPWQPDKMLHLVTLYHRLKRQTEQRVSLLEDTTSAYQEHEKMCQQLERQLKSVKEEQSKVNEETLPAEEKLKMYHSLAGSLQDSGIVLKRVTIHLEDLAPHLDPLAYEKARHQIQSWQGELKLLTSAIGETVTECESRMVQSIDFQTEMSRSLDWLRRVKAELSGPVYLDLNLQDIQEEIRKIQIHQEEVQSSLRIMNALSHKEKEKFTKAKELISADLEHSLAELSELDGDIQEALRTRQATLTEIYSQCQRYYQVFQAANDWLEDAQELLQLAGNGLDVESAEENLKSHMEFFSTEDQFHSNLEELHSLVATLDPLIKPTGKEDLEQKVASLELRSQRMSRDSGAQVDLLQRCTAQWHDYQKAREEVIELMNDTEKKLSEFSLLKTSSSHEAEEKLSEHKALVSVVNSFHEKIVALEEKASQLEKTGNDASKATLSRSMTTVWQRWTRLRAVAQDQEKILEDAVDEWTGFNNKVKKATEMIDQLQDKLPGSSAEKASKAELLTLLEYHDTFVLELEQQQSALGMLRQQTLSMLQDGAAPTPGEEPPLMQEITAMQDRCLNMQEKVKTNGKLVKQELKDREMVETQINSVKCWVQETKEYLGNPTIEIDAQLEELQILLTEATNHRQNIEKMAEEQKEKYLGLYTILPSELSLQLAEVALDLKIRDQIQDKIKEVEQSKATSQELSRQIQKLAKDLTTILTKLKAKTDNVVQAKTDQKVLGEELDGCNSKLMELDAAVQKFLEQNGQLGKPLAKKIGKLTELHQQTIRQAENRLSKLNQAASHLEEYNEMLELILKWIEKAKVLAHGTIAWNSASQLREQYILHQTLLEESKEIDSELEAMTEKLQYLTSVYCTEKMSQQVAELGRETEELRQMIKIRLQNLQDAAKDMKKFEAELKKLQAALEQAQATLTSPEVGRLSLKEQLSHRQHLLSEMESLKPKVQAVQLCQSALRIPEDVVASLPLCHAALRLQEEASRLQHTAIQQCNIMQAAVVQYEQYEQEMKHLQQLIEGAHREIEDKPVATSNIQELQAQISRHEELAQKIKGYQEQIASLNSKCKMLTMKAKHATMLLTVTEVEGLAEGTEDLDGELLPTPSAHPSVVMMTAGRCHTLLSPVTEESGEEGTNSEISSPPACRSPSPVANTDASVNQDIAYYQALSAERLQTDAAKIHPSTSASQEFYEPGLEPSATAKLGDLQRSWETLKNVISEKQRTLYEALERQQKYQDSLQSISTKMEAIELKLSESPEPGRSPESQMAEHQALMDEILMLQDEINELQSSLAEELVSESCEADPAEQLALQSTLTVLAERMSTIRMKASGKRQLLEEKLNDQLEEQRQEQALQRYRCEADELDSWLLSTKATLDTALSPPKEPMDMEAQLMDCQNMLVEIEQKVVALSELSVHNENLLLEGKAHTKDEAEQLAGKLRRLKGSLLELQRALHDKQLNMQGTAQEKEESDVDLTATQSPGVQEWLAQARTTWTQQRQSSLQQQKELEQELAEQKSLLRSVASRGEEILIQHSAAETSGDAGEKPDVLSQELGMEGEKSSAEDQMRMKWESLHQEFSTKQKLLQNVLEQEQEQVLYSRPNRLLSGVPLYKGDVPTQDKSAVTSLLDGLNQAFEEVSSQSGGAKRQSIHLEQKLYDGVSATSTWLDDVEERLFVATALLPEETETCLFNQEILAKDIKEMSEEMDKNKNLFSQAFPENGDNRDVIEDTLGCLLGRLSLLDSVVNQRCHQMKERLQQILNFQNDLKVLFTSLADNKYIILQKLANVFEQPVAEQIEAIQQAEDGLKEFDAGIIELKRRGDKLQVEQPSMQELSKLQDMYDELMMIIGSRRSGLNQNLTLKSQYERALQDLADLLETGQEKMAGDQKIIVSSKEEIQQLLDKHKEYFQGLESHMILTETLFRKIISFAVQKETQFHTELMAQASAVLKRAHKRGVELEYILETWSHLDEDQQELSRQLEVVESSIPSVGLVEENEDRLIDRITLYQHLKSSLNEYQPKLYQVLDDGKRLLISISCSDLESQLNQLGECWLSNTNKMSKELHRLETILKHWTRYQSESADLIHWLQSAKDRLEFWTQQSVTVPQELEMVRDHLNAFLEFSKEVDAQSSLKSSVLSTGNQLLRLKKVDTATLRSELSRIDSQWTDLLTNIPAVQEKLHQLQMDKLPSRHAISEVMSWISLMENVIQKDEDNIKNSIGYKAIHEYLQKYKGFKIDINCKQLTVDFVNQSVLQISSQDVESKRSDKTDFAEQLGAMNKSWQILQGLVTEKIQLLEGLLESWSEYENNVQCLKTWFETQEKRLKQQHRIGDQASVQNALKDCQDLEDLIKAKEKEVEKIEQNGLALIQNKKEDVSSIVMSTLRELGQTWANLDHMVGQLKILLKSVLDQWSSHKVAFDKINSYLMEARYSLSRFRLLTGSLEAVQVQVDNLQNLQDDLEKQERSLQKFGSITNQLLKECHPPVTETLTNTLKEVNMRWNNLLEEIAEQLQSSKALLQLWQRYKDYSKQCASTVQQQEDRTNELLKAATNKDIADDEVATWIQDCNDLLKGLGTVKDSLFFLHELGEQLKQQVDASAASAIQSDQLSLSQHLCALEQALCKQQTSLQAGVLDYETFAKSLEALEAWIVEAEEILQGQDPSHSSDLSTIQERMEELKGQMLKFSSMAPDLDRLNELGYRLPLNDKEIKRMQNLNRHWSLISSQTTERFSKLQSFLLQHQTFLEKCETWMEFLVQTEQKLAVEISGNYQHLLEQQRAHELFQAEMFSRQQILHSIIIDGQRLLEQGQVDDRDEFNLKLTLLSNQWQGVIRRAQQRRGIIDSQIRQWQRYREMAEKLRKWLVEVSYLPMSGLGSVPIPLQQARTLFDEVQFKEKVFLRQQGSYILTVEAGKQLLLSADSGAEAALQAELAEIQEKWKSASMRLEEQKKKLAFLLKDWEKCEKGIADSLEKLRTFKKKLSQSLPDHHEELHAEQMRCKELENAVGSWTDDLTQLSLLKDTLSAYISADDISILNERVELLQRQWEELCHQLSLRRQQIGERLNEWAVFSEKNKELCEWLTQMESKVSQNGDILIEEMIEKLKKDYQEEIAIAQENKIQLQQMGERLAKASHESKASEIEYKLGKVNDRWQHLLDLIAARVKKLKETLVAVQQLDKNMSSLRTWLAHIESELAKPIVYDSCNSEEIQRKLNEQQELQRDIEKHSTGVASVLNLCEVLLHDCDACATDAECDSIQQATRNLDRRWRNICAMSMERRLKIEETWRLWQKFLDDYSRFEDWLKSSERTAAFPSSSGVIYTVAKEELKKFEAFQRQVHECLTQLELINKQYRRLARENRTDSACSLKQMVHEGNQRWDNLQKRVTSILRRLKHFIGQREEFETARDSILVWLTEMDLQLTNIEHFSECDVQAKIKQLKAFQQEISLNHNKIEQIIAQGEQLIEKSEPLDAAIIEEELDELRRYCQEVFGRVERYHKKLIRLPLPDDEHDLSDRELELEDSAALSDLHWHDRSADSLLSPQPSSNLSLSLAQPLRSERSGRDTPASVDSIPLEWDHDYDLSRDLESAMSRALPSEDEEGQDDKDFYLRGAVGLSDVMIPESPEAYVKLTENAIKNTSGDHSALESQIRQLGKALDDSRFQIQQTENIIRSKTPTGPELDTSYKGYMKLLGECSSSIDSVKRLEHKLKEEEESLPGFVNLHSTETQTAGVIDRWELLQAQALSKELRMKQNLQKWQQFNSDLNSIWAWLGDTEEELEQLQRLELSTDIQTIELQIKKLKELQKAVDHRKAIILSINLCSPEFTQADSKESRDLQDRLSQMNGRWDRVCSLLEEWRGLLQDALMQCQGFHEMSHGLLLMLENIDRRKNEIVPIDSNLDAEILQDHHKQLMQIKHELLESQLRVASLQDMSCQLLVNAEGTDCLEAKEKVHVIGNRLKLLLKEVSRHIKELEKLLDVSSSQQDLSSWSSADELDTSGSVSPTSGRSTPNRQKTPRGKCSLSQPGPSVSSPHSRSTKGGSDSSLSEPGPGRSGRGFLFRVLRAALPLQLLLLLLIGLACLVPMSEEDYSCALSNNFARSFHPMLRYTNGPPPL

SEQ ID NO: 99183 - protein, 446 aa, Homo sapiens
MAEYDLTTRIAHFLDRHLVFPLLEFLSVKEIYNEKELLQGKLDLLSDTNMVDFAMDVYKNLYSDDIPHALREKRTTVVAQLKQLQAETEPIVKMFEDPETTRQMQSTRDGRMLFDYLADKHGFRQEYLDTLYRYAKFQYECGNYSGAAEYLYFFRVLVPATDRNALSSLWGKLASEILMQNWDAAMEDLTRLKETIDNNSVSSPLQSLQQRTWLIHWSLFVFFNHPKGRDNIIDLFLYQPQYLNAIQTMCPHILRYLTTAVITNKDVRKRRQVLKDLVKVIQQESYTYKDPITEFVECLYVNFDFDGAQKKLRECESVLVNDFFLVACLEDFIENARLFIFETFCRIHQCISINMLADKLNMTPEEAERWIVNLIRNARLDAKIDSKLGHVVMGNNAVSPYQQVIEKTKSLSFRSQMLAMNIEKKLNQNSRLLTGQLKILASTEEP

SEQ ID NO: 99184 - protein, 111 aa, Homo sapiens
MLYDYVERKRKENSGAQLHVTYLVSGSLIQNGHSCHKVAVVREDKLEAVKSKLAVTASIHVYSIQKAMLKDSGPLFNTDYDILKSNLQNCSKFSAIQCAAAVPRAPAESSS

SEQ ID NO: 99185 - protein, 377 aa, Homo sapiens
MKDVPGFLQQSQNSGPGQPAVWHRLEELYTKKLWHQLTLQVLDFVQDPCFAQGDGLIKLYENFISEFEHRVNPLSLVEIILHVVRQMTDPNVALTFLEKTREKVKSSDEAVILCKTAIGALKLNIGDLQVTKETIEDVEEMLNNLPGVTSVHSRFYDLSSKYYQTIGNHASYYKDALRFLGCVDIKDLPVSEQQERAFTLGLAGLLGEGVFNFGELLMHPVLESLRNTDRQWLIDTLYAFNSGNVERFQTLKTAWGQQPDLAANEAQLLRKIQLLCLMEMTFTRPANHRQLTFEEIAKSAKITVNEVELLVMKALSVGLVKGSIDEVDKRVHMTWVQPRVLDLQQVMCIKEGPPGVLVHGVKSMEMLVEHQAHDILT

SEQ ID NO: 99186 - protein, 191 aa, Homo sapiens
  MOD_RES (1)..(1): Any amino acid
XAKDWETSPLPGMLAPAAGPAFDSDPEISDVDEDEPGGLVGSADVVSPSGHSDAQTLAMMLQEQLDAINEEIRMIQEEKESTELRAEEIETRVTSGSMEALNLKQLRKRGSIPTSLTALSLASASPPLSGRSTPKLTSRSAAQDLDRMGVMTLPSDLRKHRRKLLDAAAREAWPPSPEPGRRQECLGGSGQ

SEQ ID NO: 99187 - protein, 86 aa, Homo sapiens
MGSQHSAAARPSSCRRKQEDDRDGLLAEREQEEAIAQFPYVEFTGRDSITCLTCQGTGYIPTEQVNELVALIPHSDQRLRPQRTPP

SEQ ID NO: 99188 - protein, 38 aa, Homo sapiens
MEAPLQTGMVLGVMIGAGVAVVVTAVLILLVVRRLRVP

SEQ ID NO: 99189 - protein, 97 aa, Homo sapiens
  MOD_RES (1)..(1): Any amino acid
XHTCSPTNQKLSFKERVRMASPRGQSIKSRQASVGDRRSPSTDITAEGSPTKVQKSWSFNDRTRFRPSLRLKSSQPKPVIDDKGHIKINGTVILMYL

SEQ ID NO: 99190 - protein, 161 aa, Homo sapiens
MLQITEWRFLARDEGESAVAEDPTWGEDEEPSACTTDSWAQGSVPVLHASTSEGLENFQGEVHSSGASPDSSAIAPALPFPTSHCPSAFPQDPGGVDRIPLGRSWMGRGSQEQMESWEPSPQLRVTSAPPPTSELFQEAGPGGPVEEADGQSRGLSSAGSL

SEQ ID NO: 99191 - protein, 375 aa, Homo sapiens
MLGFLSARQTGLEDPLRLRRAESTRRVLGLELNKDRDVERIHGGGINTLDIEPVEGRYMLSGGSDGVIVLYDLENSSRQSYYTCKAVCSIGRDHPDVHRYSVETVQWYPHDTGMFTSSSFDKTLKVWDTNTLQTADVFNFEETVYSHHMSPVSTKHCLVAVGTRGPKVQLCDLKSGSCSHILQGHRQEILAVSWSPRYDYILATASADSRVKLWDVRRASGCLITLDQHNGKKSQAVESANTAHNGKVNGLCFTSDGLHLLTVGTDNRMRLWNSSNGENTLVNYGKVCNNSKKGLKFTVSCGCSSEFVFVPYGSTIAVYTVYSGEQITMLKGHYKTVDCCVFQSNFQIFSYHQWSRWFFIFSENICTNYLMHFFK

SEQ ID NO: 99192 - protein, 680 aa, Homo sapiens
MCRECCEYDQIECVCPGKREVVGYTIPCCRNEENECDSCLIHPGCTIFENCKSCRNGSWGGTLDDFYVKGFYCAECRAGWYGGDCMRCGQVLRAPKGQILLESYPLNAHCEWTIHAKPGFVIQLRFVMLSLEFDYMCQYDYVEVRDGDNRDGQIIKRVCGNERPAPIQSIGSSLHVLFHSDGSKNFDGFHAIYEEITACSSSPCFHDGTCVLDKAGSYKCACLAGYTGQRCENLLEERNCSDPGGPVNGYQKITGGPGLINGRHAKIGTVVSFFCNNSYVLSGNEKRTCQQNGEWSGKQPICIKACREPKISDLVRRRVLPMQVQSRETPLHQLYSAAFSKQKLQSAPTKKPALPFGDLPMGYQHLHTQLQYECISPFYRRLGSSRRTCLRTGKWSGRAPSCIPICGKIENITAPKTQGLRWPWQAAIYRRTSGVHDGSLHKGAWFLVCSGALVNERTVVVAAHCVTDLGKVTMIKTADLKVVLGKFYRDDDRDEKTIQSLQISAIILHPNYDPILLDADIAILKLLDKARISTRVQPICLAASRDLSTSFQESHITVAGWNVLADVRSPGFKNDTLRSGVVSVVDSLLCEEQHEDHGIPVSVTDNMFCASWEPTAPSDICTAETGGIAAVSFPGRASPEPRWHLMGLVSWSYDKTCSHRLSTAFTKVLPFKDWIERNMK

SEQ ID NO: 99193 - protein, 170 aa, Homo sapiens
MSLSENSVFAYESSVHSTNVLLSLNDQRKKDVLCDVTIFVEGQRFRAHRSVLAACSSYFHSRIVGQADGELNITLPEEVTVKGFEPLIQFAYTAKLILSKENVDEVCKCVEFLSVHNIEESCFQFLKFKFLDSTADQQECPRKKCFSSHCQKTDLKLSLLDQRDLETDEV

SEQ ID NO: 99194 - protein, 28 aa, Homo sapiens
MGNSMKSTPAPAERPLPNPEGLDSDFLA

SEQ ID NO: 99195 - protein, 181 aa, Homo sapiens
MEAPLQTGMVLGVMIGAGVAVVVTAVLILLVVRRLRVPKTPAPDGPRYRFRKRDKVLFYGRKIMRKVSQSTSSLVDTSVSATSRPRMRKKLKMLNIAKKILRIQKETPTLQRKEPPPAVLEADLTEGDLANSHLPSEVLYMLKNVRVLGHFEKPLFLELCRHMVFQRLGQGDYVFRPGQPD

SEQ ID NO: 99196 - protein, 256 aa, Homo sapiens
MDNSGKEAEAMALLAEAERKVKNSQSFFSGLFGGSSKIEEACEIYARAANMFKMAKNWSEAINCLMRAIEIYTDMGRFTIAAKHHISIAEIYETELVDIEKAIAHYEQSADYYKGEESNSSANKCLLKVAGYAALLEQYQKAIDIYEQVGTNAMDSPLLKYSAKDYFFKAALCHFCIDMLNAKLAVQKYEELFPAFSDSRECKLMKKLLEAHEEQNVDSYTESVKEYDSISRLDQWLTTMLLRIKKTIQGDEEDLR

SEQ ID NO: 99197 - protein, 685 aa, Homo sapiens
  MOD_RES (1)..(1): Any amino acid
XCRSLVKVNLSGCHLTSLRLSKMLSALQHLRSLAIDVSPGFDASQLSSECKATLSRVRELKQTLFTPSYGVVPCCTSLEKLLLYFEILDRTREGAILSGQLMVGQSNVPHYQNLRVFYARLAPGYINQEVVRLYLAVLSDRTPQNLHAFLISVPGSFAESGATKNLLDSMARNVVLDALQLPKSWLNGSSLLQHMKFNNPFYFSFSRCTLSGGHLIQQVINGGKDLRSLASLNLSGCVHCLSPDSLLRKAEDDIDSSILETLVASCCNLRHLNLSAAHHHSSEGLGRHLCQLLARLRHLRSLSLPVCSVADSAPRADRAPAQPAMHAVPRGFGKKVRVGVQSCPSPFSGQACPQPSSVFWSLLKNLPFLEHLELIGSNFSSAMPRNEPAIRNSLPPCSRAQSVGDSEVAAIGQLAFLRHLTLAQLPSVLTGSGLVNIGLQCQQLRSLSLANLGMMGKVVYMPALSDMLKHCKRLRDLRLEQPYFSANAQFFQALSQCPSLQRLCLVSRSGTLQPDAVLAFMARCLQVVMCHLFTGESLATCKSLQQSLLRRWGEVTGRRPQLFTELREEPSARTSRATGRRQPCLPDSGVVCCPCGRPLAVSGIILVGVSPSLVVKTTCVYRVLFKNLDYASIFFLVCLFETESHSVVQAGVQWRDLSSLQPLLSGLQPQPPEQLGLQVCTTIPG

SEQ ID NO: 99198 - protein, 89 aa, Homo sapiens
NPLPETDSQPIPPSGGPFSEFHNGESEESHEQFLKALQNAVTTFVNRMKSNHMRGRSITNDSAVLSLFQSINGMHPQLLELLNQLDERR

SEQ ID NO: 99199 - protein, 798 aa, Homo sapiens
MAGRVPSLLVLLVFPSSCLAFRSPLSVFKRFKETTRPFSNECLGTTRPVVPIDSSDFALDIRMPGVTPKQSDTYFCMSMRIPVDEEAFVIDFKPRASMDTVHHMLLFGCNMPSSTGSYWFCDEGTCTDKANILYAWARNAPPTRLPKGVGFRVGGETGSKYFVLQVHYGDISAFRDNNKDCSGVSLHLTRLPQPLIAGMYLMMSVDTVIPAGEKVVNSDISCHYKNYPMHVFAYRVHTHHLGKVVSGYRVRNGQWTLIGRQSPQLPQAFYPVGHPVDVSFGDLLAARCVFTGEGRTEATHIGGTSSDEMCNLYIMYYMEAKHAVSFMTCTQNVAPDMFRTIPPEANIPIPVKSDMVMMHEHHKETEYKDKIPLLQQPKREEEEVLDQDFHMEEALDWPGVYLLPGQVSGVALDPKNNLVIFHRGDHVWDGNSFDSKFVYQQIGLGPIEEDTILVIDPNNAAVLQSSGKNLFYLPHGLSIDKDGNYWVTDVALHQVFKLDPNNKEGPVLILGRSMQPGSDQNHFCQPTDVAVDPGTGAIYVSDGYCNSRIVQFSPSGKFITQWGEESSGSSPLPGQFTVPHSLALVPLLGQLCVADRENGRIQCFKTDTKEFVREIKHSSFGRNVFAISYIPGLLFAVNGKPHFGDQEPVQGFVMNFSNGEIIDIFKPVRKHFDMPHDIVASEDGTVYIGDAHTNTVWKFTLTEKLEHRSVKKAGIEVQEIKDSEHKLETSSGRVLGRFRGKGSGGLNLGNFFASRKGYSRKGFDRLSTEGSDQEKEDDGSESEEEYSAPLPALAPSSS

SEQ ID NO: 99200 - protein, 490 aa, Homo sapiens
VNMTECVPVPSSEHVAEIVGRQGCKIKALRAKTNTYIKTPVRGEEPVFIVTGRKEDVEMAKREILSAAEHFSIIRATRSKAGGLPGAAQGPPNLPGQTTIQVRVPYRVVGLVVGPKGATIKRIQQRTHTYIVTPGRDKEPVFAVTGMPENVDRAREEIEAHITLRTGAFTDAGPDSDFHANGTDVCLDLLGAAASLWAKTPNQGRRPPTATAGLRGDTALGAPSAPEAFYAGSRGGPSVPDPGPASPYSGSGNGGFAFGAEGPGAPVGTAAPDDCDFGFDFDFLALDLTVPAAATIWAPFERAAPLPAFSGCSTVNGAPGPPAAGARRSSGAGTPRHSPTLPEPGGLRLELPLSRRGAPDPVGALSWRPPQGPVSFPGGAAFSTATSLPSSPAAAACAPLDSGASENSRKPPSASSAPALARECVVCAEGEVMAALVPCGHNLFCMDCAVRICGKSEPECPACRTPATQAIRVETETPQPGGASALQRQY

SEQ ID NO: 99201 - protein, 213 aa, Homo sapiens
MHYYRYSNAKVSCWYKYLLFSYNIIFWLAGVVFLGVGLWAWSEKGVLSDLTKVTRMHGIDPVVLVLMVGVVMFTLGFAGCVGALRENICLLNFNQCCGAYGPEDWDLNVYFNCSGASYSREKCGVPFSCCVPDPAQKVVNTQCGYDVRIQLKSKWDESIFTKGCIQALESWLPRNIYIVAGVFIAISLLQIFGIFLARTLISDIEAVKAGHHF

SEQ ID NO: 99202 - protein, 112 aa, Homo sapiens
MVSISCLVIRPPRPPKVLGLQEGQENVEILPSGERPQANQKRITTPYMTKYERARVLGTRALQIAMCAPVMVELEGETDPLLIAMKELKARKIPIIIRRYLPDGSYEDWGVD

SEQ ID NO: 99203 - protein, 136 aa, Homo sapiens
MAHCVTLVQLSISCDHLIDKDIGSKSDPLCVLLQDVGGGSWAELGRTERVRNCSSPEFSKTLQLEYRFETVQKLRFGIYDIDNKTPELRDDDFLGGAECSLGQIVSSQVLTLPLMLKPGKPAGRGTITVSAQELKD

SEQ ID NO: 99204 - protein, 49 aa, Homo sapiens
EECDMKKMHYVDPDHVKTYTVPLKEAGPSLLKHSVSPGTSIFKPSLFSP

SEQ ID NO: 99205 - protein, 39 aa, Homo sapiens
MFFSAALRARAAGLTAHWVRRLKLSPALPPPFSCSPCLP

SEQ ID NO: 99206 - protein, 281 aa, Homo sapiens
MTQLTVEKVMDWYQTRAEEIEHYARQLQQKIIPDQDQLMAIALECIYTCERNDQLCLCYDLLECLPERGYGDKTEATTKLHDMVDQLEQILSVSELLEKHGLEKPISFVKNTQSSSEEARKLMVRLTRHTGRKQPPVSESHWRTLLQDMLTMQQNVYTCLDSDACYEIFTESLLCSSRLENIHLAGQMMHCSACSENPPAGIAHKGKPHYRVSYEKSIDLVLAASREYFNSSTNLTDSCMDLARCCLQLITDRPPAIQEELDLIQAVGCLEEFGVKILPLQ

SEQ ID NO: 99207 - protein, 516 aa, Homo sapiens
MTENMKECLAQTNAAVGDMVTVVKTEVCSPLRDQEYGQPCSRRPDSSAMEVEPKKLKGKRDLIVPKSFQQVDFWFCESCQEYFVDECPNHGPPVFVSDTPVPVGIPDRAALTIPQGMEVVKDTSGESDVRCVNEVIPKGHIFGPYEGQISTQDKSAGFFSWLIVDKNNRYKSIDGSDETKANWMRNVAHLAERKRKPKFSKEELDILVTEVTHHEAVLFGRETMRLSHADRDKIWEGIARKITSVSQVPRSVKDIKHRWDDMKRRTKDKLAFMQQSLSGPGAGGRAPTIVLTAHERAIKSALLTARAGRGFPRAELDGTDSPSTSYDEDEEAPGPSRQPLRVPLQRSPEEEAHLARPALLRSSSSSDQSETVGPKPEALPHPSPQAQAACRTPRPHPSPPTTGLDWQLLHVHAQQTEVFRQFCQELVTVHRDMANSMHVIGQAMAELTSRVGQMCQTLTEIRDGVQASQRGPEGADPTGSTPQATQAQAPLPEPPPASPASAPTRTTRSRKRKHNF

SEQ ID NO: 99208 - protein, 125 aa, Homo sapiens
MVLILGRRLNREDLGVRDSPATKRKVFEMDPKSLTGHEFFDFSSGSSHAENILQIFNEFRDSRLFTDVIICVEGKEFPCHRAVLSACSSYFRAMFCNDHRESREMLVEINGILAEAMECFLQYVY

SEQ ID NO: 99209 - protein, 150 aa, Homo sapiens
MASKKREVQLQAEADNIVTLQPFRDKCEPVFLFSVNGKIIEKIQGANAPLVNKKVINLIDEERKIAAGEMARPQYPEIPLVDSDSEVSEESPCESVQELYSIAIIKPDAVISKKVLEIKRKITKAGFIIEAEHKTVLTEEQVVNFYSRIA

SEQ ID NO: 99210 - protein, 101 aa, Homo sapiens
MRAAGVGLVDCHCHLSAPDFDRDLDDVLEKAKKANVVALVAVAEHSGEFEKIMQLSERYNGFVLPCLGVHPVQGLPPEDQRSVTLKVLRRYCCMHLMVGHL

SEQ ID NO: 99211 - protein, 114 aa, Homo sapiens
  MOD_RES (1)..(1): Any amino acid
XKRKSVTFQFLKELQNELEREITFQGDSAIYYSYYKDMLKAPSFERGVYELTHNNKTVSLKTINAVQQMSLYPELIASILYQATGSNEIIEPVYFYIGIVFGLQGIYVTALFVT

SEQ ID NO: 99212 - protein, 336 aa, Homo sapiens
MQAFLKGTSISTKPPLTKDRGVAASAGSSGENKKAKPVPWVEKYRPKCVDEVAFQEEVVAVLKKSLEGADLPNLLFYGPPGTGKTSTILAAARELFGPELFRLRVLELNASDERGIQVVREKVKNFAQLTVSGSRSDGKPCPPFKIVILDEADSMTSAAQAALRRTMEKESKTTRFCLICNYVSRIIEPLTSRCSKFRFKPLSDKIQQQRLLDIAKKENVKISDEGIAYLVKVSEGDLRKAITFLQSATRLTGGKEITEKVITDIAGDLIDEGHAATQLVNQLHDVVVENNLSDKQKSIITEKLAEVDKCLADGADEHLQLISLCATVMQQLSQNC

SEQ ID NO: 99213 - protein, 1276 aa, Homo sapiens
MSSSRAQQMHAFSWIRNTLEEHPETSLPKQEVYDEYKSYCDNLGYHPLSAADFGKIMKNVFPNMKARRLGTRGKSKYCYSGLRKKAFVHMPTLPNLDFHKTGDGLEGAEPSGQLQNIDEEVISSACRLVCEWAQKVLSQPFDTVLELARFLVKSHYIGTKSMAALTVMAAAPAGMKGITQPSAFIPTAESNSFQPQVKTLPSPIDAKQQLQRKIQKKQQEQKLQSPLPGESAAKKSESATSNGVTNLPNGNPSILSPQPIGIVVAAVPSPIPVQRTRQLVTSPSPMSSSDGKVLPLNVQVVTQHMQSVKQAPKTPQNVPASPGGDRSARHRYPQILPKPANTSALTIRSPTTVLFTSSPIKTAVVPASHMSSLNVVKMTTISLTPSNSNTPLKHSASVSSATGTTEESRSVPQIKNGSVVSLQSPGSRSSSAGGTSAVEVKVEPETSSDEHPVQCQENSDEAKAPQTPSALLGQKSNTDGALQKPSNEGVIEIKATKVCDQRTKCKSRCNEMLPGTSTGNNQSTITLSVASQNLTFTSSSSPPNGDSINKDPKLCTKSPRKRLSSTLQETQVPPVKKPIVEQLSAATIEGQKQGSVKKDQKVPHSGKTEGSTAGAQIPSKVSVNVSSHIGANQPLNSSALVISDSALEQQTTPSSSPDIKVKLEGSVFLLDSDSKSVGSFNPNGWQQITKDSEFISASCEQQQDISVMTIPEHSDINDLEKSVWELEGMPQDTYSQQLHSQIQESSLNQIQAHSSDQLPLQSELKEFEPSVSQTNESYFPFDDELTQDSIVEELVLMEQQMSMNNSHSYGNCLGMTLQSQSVTPGAPMSSHTSSTHFYHPIHSNGTPIHTPTPTPTPTPTPTPTPTPTSEMIAGSQSLSRESPCSRLAQTTPVDSALGSSRHTPIGTPHSNCSSSVPPSPVECRNPFAFTPISSSMAYHDASIVSSSPVKPMQRPMATHPDKTKLEWMNNGYSGVGNSSVSGHGILPSYQELVEDRFRKPHAFAVPGQSYQSQSRHHDTHFGRLTPVSPVQHQGATVNNTNKQEGFAVPAPLDNKGTNSSASSNFRCRSVSPAVHRQRNLSGSTLYPVSNIPRSNVTPFGSPVTPEVHVFTNVHTDACANNIAQRSQSVPLTVMMQTAFPNALQKQANSKKITNVLLSKLDSDNDDAVRGLGMNNLPSNYTARMNLTQILEPSTVFPSANPQNMIDSSTSVYEFQTPSYLTKSNSTGQINFSPGDNQAQSEIGEQQLDFNSTVKDLLSGDSLQTNQQLKYPDVLGE

SEQ ID NO: 99214 - protein, 244 aa, Homo sapiens
MPDSNFAERSEEQVSGAKVIAQALKTQDVEYIFGIVGIPVTEIAIAAQQLGIKYIGMRNEQAACYAASAIGYLTSRPLLVIGGSSERNQETMGAFQEFPQVEACRLYTKFSARPSSIEAIPFVIEKAVRSSIYGRPGACYVDIPADFVNLQVNVNSIKYMERCMSPPISMAETSAVCTAASVIRNAKQPLLIIGKGAAYAHAEESIKKLVEQYKLPFLPTPMGKGVVPDNHPYCVGAARSRCVA

SEQ ID NO: 99215 - protein, 183 aa, Homo sapiens
MAAAMPLALLVLLLLGPGGWCLAEPPRDSLREELVITPLPSGDVAATFQFRTRWDSELQREGVSHYRLFPKALGQLISKYSLRELHLSFTQGFWRTRYWGPPFLQAPSGAELWVWFQDTVTELVPLPDVLPNPHGALPPGFREPSLCGHHHLQPGQRDIRGAPTPDHYISGRHPRHSEDLCHL

SEQ ID NO: 99216 - protein, 103 aa, Homo sapiens
MSGVSEPLSRVKLGTLRRPEGPAEPMVVVPVDVEKEDVRILKVCFYSNSFNPGKNFKLVKCTVQTEIREIITSILLSGRIGPNIRLAECYGLRLKHMKSDEIH

SEQ ID NO: 99217 - protein, 72 aa, Homo sapiens
MATFISVQLKKTSEVDLAKPLVKFIQQTYPSGGEEQAQYCRAAEELSKLRRAAVGRPLDKHEGALETLLRSA

SEQ ID NO: 99218 - protein, 57 aa, Homo sapiens
MCLQTLNFGNGFALALCLSFLPNTDVPILACGNDDCRIHIFAQQNDQFQKVLSLCGH

SEQ ID NO: 99219 - protein, 150 aa, Homo sapiens
MPWESDIWDINNQICTVKDIKAEPQPLSPASSSYSVSSPRSVDSYSSTQHVPEELDLSSSSQMSPLSLYGENSNSLSSAEPLKEDKPVTGPRNKTENGLTPKKKIQVNSKPSIQPKPLLLPAAPKTQTNSSVPAKTIIIQTVPTLMPLAK

SEQ ID NO: 99220 - protein, 511 aa, Homo sapiens
MEGNKLEEQDSSPPQSTPGLMKGNKREEQGLGPEPAAPQQPTAEEEALIEFHRSYRELFEFFCNNTTIHGAIRLVCSQHNRMKTAFWAVLWLCTFGMMYWQFGLLFGEYFSYPVSLNINLNSDKLVFPAVTICTLNPYRYPEIKEELEELDRITEQTLFDLYKYSSFTTLVAGSRSRRDLRGTLPHPLQRLRVPPPPHGARRARSVASSLRDNNPQVDWKDWKIGFQLCNQNKSDCFYQTYSSGVDAVREWYRFHYINILSRLPETLPSLEEDTLGNFIFACRFNQVSCNQANYSHFHHPMYGNCYTFNDKNNSNLWMSSMPGINNGLSLMLRAEQNDFIPLLSTVTGARVMVHGQDEPAFMDDGGFNLRPGVETSISMRKETLDRLGGDYGDCTKNGSDVPVENLYPSKYTQQVCIHSCFQESMIKECGCAYIFYPRPQNVEYCDYRKHSSWGYCYYKLQVDFSSDHLGCFTKCRKPCRNGSSRCYRDRTITPSTTREMEWPKSTSSSRS

SEQ ID NO: 99221 - protein, 243 aa, Homo sapiens
MSTAREQPIFSTRAHVFQIDPATKRNWIPAGKHALTVSYFYDATRNVYRIISIGGAKAIINSTVTPNMTFTKTSQKFGQWADSRANTVYGLGFASEQHLTQFAEKFQEVKEAARLAREKSQDGGELTSPALGLASHQVPPSPLVSANGPGEEKLFRSQSADAPGPTERERLKKMLSEGSVGEVQWEAEFFALQDSNNKLAGALREANAAAAQWRQQLEAQRAEAERLRQRVAELEAQAASEVT

SEQ ID NO: 99222 - protein, 106 aa, Homo sapiens
  MOD_RES (1)..(1): Any amino acid
XDGTEIHEASAILVHLSRGGAEVQIFAPDVPQMHVIDHTKGQPSEGESRNVLTESARIARGKITDLANLSAANHDAAIFPGGFGAAKNLGSPYSDPAKHRSLGLQL

SEQ ID NO: 99223 - protein, 187 aa, Homo sapiens
MTHLNSLDVQLAQELGDFTDDDLDVVFTPKECRTLQPSLPEEGVELDPHVRDCVQTYIREWLIVNRKNQGSPEICGFKKTGSRKDFHKTLPKQTFESETLECSEPAAQAGPRHLNVLCDVSGKGPVTACDFDLRSLQPDKRLENLLQQVSAEDFEKQNEEARRTNRQAELFALYPSVDEFCDGDANM

SEQ ID NO: 99224 - protein, 103 aa, Homo sapiens
MSSAAENGEAAPGKQNEEKTYKKTASSAIKGAIQLGIGYTVGNLTSKPERDVLMQDFYVVESVFLPSEGSNLTPAHHYPDFRFKTYAPLAFRYFRELFGIKPD

SEQ ID NO: 99225 - protein, 285 aa, Homo sapiens
FGGKLVTFENVRMPSHQGAEQQQQQHHVFISQVVTEKEFLSRSDQLQQAVQSQGFINYCQKKIDASQTEFEKNVWSFLKVNFEDDSRGKYLELLGYRKEDLGKKALKDSDQVAQSDGEESPAAEEQLLGEHIKEEKEESEFLPSSGGTFNISVSGDIDGLITQALLTGNFESAVDLCLHDNRMADAIILAIAGGQELLARTQKKYFAKSQSKITRLITAVVMKNWKEIVESCDLKNWREALAAVLTYAKPDEFSALCDLLGTRLENEGDSLLQTQACLCYICAGN

SEQ ID NO: 99226 - protein, 780 aa, Homo sapiens
MDNFAEGDFTVADYALLEDCPHVDDCVFAAEFMSNDYVRVTQLYCDGVGVQYKDYIQSERNLEFDICSIWCSKPISVLQDYCDAIKINIFWPLLFQHQNSSVISRLHPCVDANNSRASEINLKKLQHLELMEDIVDLAKKVANDSFLIGGLLRIGCKIENKILAMEEALNWIKYAGDVTILTKLGSIDNCWPMLSIFFTEYKYHITKIVMEDCNLLEELKTQSCMDCIEEGELMKMKGNEEFSKERFDIAIIYYTRAIEYRPENYLLYGNRALCFLRTGQFRNALGDGKRATILKNTWPKGHYRYCDALSMLGEYDWALQANIKAQKLCKNDPEGIKDLIQQHVKLQKQIEDLQGRTANKDPIKAFYENRAYTPRSLSAPIFTTSLNFVEKERDFRKINHEMANGGNQNLKVADEALKVDDCDCHPEFSPPSSQPPKHKGKQKSRNNESEKFSSSSPLTLPADLKNILEKQFSKSSRAAHQDFANIMKMLRSLIQDGYMALLEQRCRSAAQAFTELLNGLDPQKIKQLNLAMINYVLVVYGLAISLLGIGQPEELSEAENQFKRIIEHYPSEGLDCLAYCGIGKVYLKKNRFLEALNHFEKARTLIYRLPGVLTWPTSNVIIEESQPQKIKMLLEKFVEECKFPPVPDAICCYQKCHGYSKIQIYITDPDFKGFIRISCCQYCKIEFHMNCWKKLKTTTFNDKIDKDFLQGICLTPDCEGVISKIIIFSSGGEVKCEFEHKVIKEKVPPRPILKQKCSSLEKLRLKEDKKLKRKIQKKEA

SEQ ID NO: 99227 - protein, 505 aa, Homo sapiens
GTEDLDKVKPRVQETGEIKEPLEISISQDVHDSKNTLTTGVEEIRSVDIINMLLNFEIKEVVVTLMKKSEKKGRPLHELNVLQLGMEAKVKTYDMTAKAYLKKISMQCFDFTDSKGEPLHIINSSNVTDEPLLKMLLTKADSDGPEFKTIHDSTKQRLKVSFASLDLVLHLEALLSFMDFLSSAAPFSEPSSSEKESELKPLVGESRSIAVKAVSSNISQKDVFDLKITAELNAFNVFVCDQKCNIADIKIHGMDASISVKPKQTDVFARLKDIIVMNVDLQSIHKKAVSILGDEVFRFQLTLYPDATEGEAYADMSKVDGKLSFKVGCIQIVYVHKFFMSLLNFLNNFQTAKEALSTATVQAAERAASSMKDLAQKSFRLLMDINLKAPVIIIPQSSVSPNAVIADLGLIRVENKFSLVPMEHYSLPPVIDKMNIELTQLKLSRTILQASLPQNDIEILKPVNMLLSIQRNLAAAWYVQIPGMEIKGKLKPMQNKKIGQTQSSL

SEQ ID NO: 99228 - protein, 178 aa, Homo sapiens
MSAHSMLCERIAIAKELIKRAESLSRSRKGGIEGGAKLCSKLKAELKFLQKVEAGKVAIKESHLQSTNLTHLRAIVESAENLEEVVSVLHVFGYTDTLGEKQTLVVDVVANGGHTWVKAIGRKAEALHNIWLGRGQYGDKSIIEQAEDFLQASHQQPVQYSNPHIIFAFYNSVSSPMA

SEQ ID NO: 99229 - protein, 187 aa, Homo sapiens
MAAFGRQMAPPGCRKTSSGLPVILHYGKLKRVLYCCPEIFTMRQQDINDTVRLLKEKCLFTVQQVTKILHSCPSVLREDLGQLEYKFQYAYFRMGIKHPDIVKSEYLQYSLTKIKQRHIYLERLGRYQTPDKKGQTQIPNPLLKDILRVSEAEFLARTACTSVEEFQVFKKLLAREEEESESSTSDD

SEQ ID NO: 99230 - protein, 125 aa, Homo sapiens
MADSVKTFLQDLARGIKDSIWGICTISKLDARIQQKREEQRRRRASSVLAQRRAQSIERKQESEPRIVSRIFQCCAWNGGVFWFSLLLFYRVFIPVLQSVTARIIGDPSLHGDVWSWLEFFLTSI

SEQ ID NO: 99231 - protein, 370 aa, Homo sapiens
MRPRGLPPLLVVLLGCWASVSAQTDATPAVTTEGLNSTEAALATFGTFPSTRPPGTPRAPGPSSGPRPTPVTDVAVLCVCDLSPAQCDINCCCDPDCSSVDFSVFSACSVPVVTGDSQFCSQKAVIYSLNFTANPPQRVFELVDQINPSIFCIHITNYKPALSFINPEVPDENNFDTLMKTSDGFTLNAESYVSFTTKLDIPTAAKYEYGVPLQTSDSFLRFPSSLTSSLCTDNNPAAFLVNQAVKCTRKINLEQCEEIEALSMAFYSSPEILRVPDSRKKDSCQLPGALVIEVKWTKYGSLLNPQAKIVNVTANLISSSFPEANSGNERTILISTAVTFVDVSAPAEAGFRAPPAINARLPFNFFFPFV

SEQ ID NO: 99232 - protein, 125 aa, Homo sapiens
MNEWTNTGREPDPLPSSLPGPTAPGLGEPQAEVEETLKRIQSHKGVIGTMVVNAEGIPIRTTLDNSTTVQYAGLLHHLTMKAKSTVRDIDPQNDLTFLRIRSKKHEIMVAPDKEYLLIVIQNPCE

SEQ ID NO: 99233 - protein, 293 aa, Homo sapiens
MAQPQLYLPEPFKIAYRKVGQCRRFQQLKKKNGSFKRKGIERWHRAVSTNLLKQNVLVPKEESSSDSDMGFHESQQNQKSNLKTKVKTAFGRMLSYKYRSKPACASQEGSTDHKEALLSNTQSLLPRIVKEFSSPKLFTAKMRKLSENATIQLDVVEAETEEITQGNTLLRARRTTKRLSVTSLPSGLQKGPYSPKKRPHFPALKKKKRGMENILRKSDLTVGKLQMQVDDLIETVTDKSMKLLAQRHAELQQCEFLGDEILQSSKQFQRISKRTMRKYKLKNVCFPCTCCCF

SEQ ID NO: 99234 - protein, 35 aa, Homo sapiens
  MOD_RES (1)..(1): Any amino acid
XFEISENQKRQAAMTVRKVPKQKDIYPEEIVIIKV

SEQ ID NO: 99235 - protein, 356 aa, Homo sapiens
MAPWLQLLSLLGLLPGAVAAPAQPRAASFQAWGPPSPELLAPTRFALEMFNRGRAAGTRAVLGLVRGRVRRAGQGSLYSLEATLEEPPCNDPMVCRLPVSKKTLLCSFQVLDELGRHVLLRKDCGPVDTKVPGAGEPKSAFTQGSAMISSLSQNHPDNRNETFSSVISLLNEDPLSQDLPVKMASIFKNFVITYNRTYESKEEARWRLSVFVNNMVRAQKIQALDRGTAQYGVTKFSDLTEEEFRTIYLNTLLRKEPGNKMKQAKSVGDLAPPEWDWRSKGAVTKVKDQGMCGSCWAFSVTGNVEGQWFLNQGTLLSLSEQELLDCDKMDKACMGGLPSNAYSAIKNLASDVSFLE

SEQ ID NO: 99236 - protein, 164 aa, Homo sapiens
MDYDFKVKLSSERERVEDLFEYEGCKVGRGTYGHVYKAKRKDGKDDKDYALKQIEGTGISMSACREIALLRELKHPNVISLQKVFLSHADRKVWLLFDYAEHDLWHIIKFHRASKANKKPVQLPRGMVKSLLYQILDGIHYLHANWVLHRDLLTWALPDYLIHL

SEQ ID NO: 99237 - protein, 485 aa, Homo sapiens
MNCQQLWLGFLLPMTVSGRVLGLAEVAPVDYLSQYGYLQKPLEGSNNFKPEDITEALRAFQEASELPVSGQLDDATRARMRQPRCGLEDPFNQKTLKYLLLARAALRQAFQDWSNVAPLTFQEVQAGAADIRLSFHGRQSSYCSNTFDGPGRVLAHADIPELGSVHFDEDEFWTEGTYRGVNLRIIAAHEVGHALGLGHSRYSQALMAPVYEGYRPHFKLHPDDVAGIQALYGKKSPVIRDEEEEETELPTVPPVPTEPSPMPDPCSSELDAMMLGPRGKTYAFKGDYVWTVSDSGPGPLFRVSALWEGLPGNLDAAVYSPRTQWIHFFKGDKVWRYINFKMSPGFPKKLNRVEPNLDAALYWPLNQKVFLFKGSGYWQWDELARTDFSSYPKPIKGLFTGVPNQPSAAMSWQDGRVYFFKGKVYWRLNQQLRVEKGYPRNISHNWMHCRPRTIDTTPSGGNTTPSGTGITLDTTLSATETTFEY

SEQ ID NO: 99238 - protein, 81 aa, Homo sapiens
VLCCAPSNIAVDNLVERLALCKQRILRLGHPARLLESIQQHSLDAVLARSDSAQIVADIRKDIDQVFRQRFTVLARLVSIS

SEQ ID NO: 99239 - protein, 101 aa, Homo sapiens
MSTRKRRGGAINSRQAQKRTREATSTPEISLEAEPIELVETAGDEIVDLTCESLEPVVVDLTHNDSVVIVDGPQVLSVVPSAWTDTQRSCRMDVSSFPQNA

SEQ ID NO: 99240 - protein, 456 aa, Homo sapiens
MSAQCCAGQLACCCGSAGCSLCCDCCPRIRQSLSTRFMYALYFILVVVLCCIMMSTTVAHKMKEHIPFFEDMCKGIKAGDTCEKLVGYSAVYRVCFGMACFFFIFCLLTLKINNSKSCRAHIHNGFWFFKLLLLGAMCSGAFFIPDQDTFLNAWRYVGAVGGFLFIGIQLLLLVEFAHKWNKNWTAGTASNKLWYASLALVTLIMYSIATGGLVLMAVFYTQKDSCMENKILLGVNGGLCLLISLVAISPWVQNRQPHSGLLQSGVISCYVTYLTFSALSSKPAEVDEHGKNVTICVPDFGQDLYRDENLVTILGTSLLIGCILYSCLTSTTRSSSDALQGRYAAPELEIARCCFCFSPGGEDTEEQQPGKEGPRVIYDEKKGTVYIYSYFHFVFFLASLYVMMTVTNWFKWSPTLLPRLEYSGMILAHCNLHLPDVKRFSCLSLPSSWGYRHVPP

SEQ ID NO: 99241 - protein, 143 aa, Homo sapiens
MVKLFIGNLPREATEQEIRSLFEQYGKVLECDIIKNYGFVHIEDKTAAEDAIRNLHHYKLHGVNINVEASKNKSKASTKLHVGNISPTCTNQELRAKFEEYGPVIECDIVKDYAFVHMERAEDAVEAIRGLDNTEFQGRIIAD

SEQ ID NO: 99242 - protein, 113 aa, Homo sapiens
MSEDSSALPWSINRDDYELQEVIGSGATAVVQAAYCAPKKEKVAIKRINLEKCQTSMDELLKEIQAMSQCHHPNIVSYYTSFVVKDELWLVMKLLSGVTHWRNWIALLKALFI

SEQ ID NO: 99243 - protein, 191 aa, Homo sapiens
  MOD_RES (1)..(1): Any amino acid
XNIPRFYFPEGLPDTCSNHEQTLSRIETAFMDIEEQKADIYEMGKIAKVCGCPLYWKAPMFRAAGGEKTGFVTAQSFIAMWRKLLNNHHDDASKFICLLAKPNCSSLEQEDFIPLLQDVVDTHPGLTFLKDAPEFHSRYITTVIQRIFYTVNRSWSGKITSTEIRKSNFLQSNEDLAKLAVHDGYTNIFLF

SEQ ID NO: 99244 - protein, 864 aa, Homo sapiens
MEKMSRVTTALGGSVLTGRTMHCHLDAPANAISVCRDAAQVVVAGRSIFKIYAIEEEQFVEKLNLRVGRKPSLNLSCADVVWHQMDENLLATAATNGVVVTWNLGRPSRNKQDQLFTEHKRTVNKVCFHPTEAHVLLSGSQDGFMKCFDLRRKDSVSTFSVLSCRILRLHHSFAHGPMQDAESTANDAREYVLQITWCPAPGPRLLWRLCVAASLGRSWGCPLYPLGLCSGPQAGQSESVRDVQFSIRDYFTFASTFENGNVQLWDIRRPDRCERMFTAHNGPVFCCDWHPEDRGWLATGGRDKMVKVWDMTTHRAKEMHCVQTIASVARVKWRPECRHHLATCSMMVDHNIYVWDVRRPFVPAAMFEEHRDVTTGIAWRHPHDPSFLLSGSKDSSLCQHLFRDASQPVERANPEGLCYGLFGDLAFAAKESLVAAESGRKPYTGDRRHPIFFKRKLDPAEPFAGLASSALSVFETEPGGGGMRWFVDTAERYALAGRPLAELCDHNAKVARELGRNQVAQTWTMLRIIYCSPGLVPTANLNHSVGKGGSCGLPLMNSFNLKDMAPGLGSETRLDRSKGDARSDTVLLDSSATLITNEDNEETEGSDVPADYLLGDVEGEEDELYLLDPEHAHPEDPECVLPQEAFPLRHEIVDTPPGPEHLQDKADSPHVSGSEADVASLAPVDSSFSLLSVSHALYDSRLPPDFFGVLVRDMLHFYAEQGDVQMAVSVLIVLGERVRKDIDEQTQEHWYTSYIDLLQRFRLWNVSNEVVKLSTSRAVSCLNQASTTLHVNCSHCKRPMSSRGWVCDRCHRCASMCAVCHHVVKGLFVWCQGCSHGGHLQHIMKWLEGSSHCPAGCGHLCEYS

SEQ ID NO: 99245 - protein, 76 aa, Homo sapiens
MPQRGHPSQEGLWALPSLPMAHGPKPETEGLLDLSFLTEEEQEAIAGVLQRDARLRQLEEGRVSKLRASVADPGQL

SEQ ID NO: 99246 - protein, 60 aa, Homo sapiens
MQTDPANCDYVIVSGAQRKEERWDMADNEQVLTTGERHPLTCLGALALSLRWGPQSPAEL

SEQ ID NO: 99247 - protein, 565 aa, Homo sapiens
MGPRIEDMPQDFKASLCLPTTSAPASAPSNGNCSSYTETQHLSVVGIMFVAQTLLGVGGVPIQPFGISYIDDFAHNSNSPLYLGILFAVTMMGPGLAFGLGSLMLRLYVDINQMPEGGISLTIKDPRWVGAWWLGFLIAAGAVALAAIPYFFFPKEMPKEKRELQFRRKVLAVTDSPARKGKDSPSKQSPGESTKKQDGLVQIAPNLTVIQFIKVFPRVLLQTLRHPIFLLVVLSQVCLSSMAAGMATFLPKFLERQFSITASYANLLIGCLSFPSVIVGIVVGGVLVKRLHLGPVGCGALCLLGMLLCLFFSLPLFFIGCSSHQIAGITHQTSAHPGLELSPSCMEACSCPLDGFNPVCDPSTRVEYITPCHAGCSSWVVQDALDNSQVFYTNCSCVVEGNPVLAGSCDSTCSHLVVPFLLLVSLGSALACLTHTPSFMLILRGVKKEDKTLAVGIQFMFLRILAWMPSPVIHGSAIDTTCVHWALSCGRRAVCRYYNNDLLRNRFIGLQFFFKTGSVICFALVLAVLRQQDKEARTKESRSSPAVEQQLLVSGPGKKPEDSRV

SEQ ID NO: 99248 - protein, 701 aa, Homo sapiens
PCDPQVICNRVNHVHGCLAELQEQAARRRAELEASRSLWALLQELEEAESWARDKERLLEAAGGGGAAGAAGAAGTAGGAHDLSSTARLLAQHKILQGELGGRRALLQQALRCGEELVAAGGAVGPGADTVHLVGLAERAASARRRWQRLEEAAARRERRLQEARALHQFGADLDGLLDWLRDAYRLAAAGDFGHDEASSRRLARQHRALTGEVEAHRGPVSGLRRQLATLGGASGAGPLVVALQVRVVEAEQLFAEVTEVAALRRQWLRDALAVYRMFGEVHACELWIGEKEQWLLSMRVPDSLDDVEVVQHRFESLDQEMNSLMGRVLDVNHTVQELVEGGHPSSDEVRSCQDHLNSRWNRIVELVEQRKEEMSAVLLVENHVLEVAEVRAQVREKRRAVESAPRAGGALQWRLSGLEAALQALEPRQAALLEEAALLAERFPAQAARLHQGAEELGAEWGALASAAQACGEAVAAAGRLQRFLHDLDAFLDWLVRAQEAAGGSEGPLPNSLEEADALLARHAALKEEVDQREEDYARIVAASEALLAADGAELGPGLALDEWLPHLELGWHKLLGLWEARREALVQAHIYQLFLRDLRQALVVLRNQEMALSGAELPGTVESVEEALKQHRDFLTTMELSQQKMQVAVQAAEGLLRQGNIYGEQAQEAVTRLLEKCLIIHPALLHPPWEPPDLPRSSS

SEQ ID NO: 99249 - protein, 74 aa, Homo sapiens
MPFDGFDHKNLIRQISSGEYREPTQPSDARGLIRWMLMVNPDRRATIEDIANHWWVNWGYKSSVCDCDALHDSE

SEQ ID NO: 99250 - protein, 177 aa, Homo sapiens
MDLPVDEWKSYLLQKWASLPTSVQVTISTAETLRDIFLHSSSLLQPEDELFLKRLSKGYLVGKDSDAPLFYREEGNKKFQEKDYTGAAVLYSKGVSHSRPNTEDMSLCHANRSAALFHLGQYETCLKDINRAQTHGYPERLQPKIMLRKAECLVALGRLQEASQTISDLERNFTATP

SEQ ID NO: 99251 - protein, 356 aa, Homo sapiens
MGTRRKVLVLGSGYISEPVLEYLSRDGNIEITVGSDMKNQIEQLGKKYNINPVSMDICKQEEKLGFLVAKQDLVISLLPYVLHPLVAKACITNKVNMVTASYITPALKELEKSVEDAGITIIGELGLDPGLDHMLAMETIDKAKEVGATIESYISYCGGLPAPEHSNNPLRYKFSWSPVGVLMNVMQSATYLLDGKVVNVAGGISFLDAVTSMDFFPGLNLEGYPNRDSTKYAEIYGISSAHTLLRGTLRYKGYMKALNGFVKLGLINREALPAFRPEANPLTWKQLLCDLVGISPSSEHDVLKEAVLKKLGGDNTQLEAAECGVFLLSCRRFGVVIEYYMKTFFHMTAVASCWYT

SEQ ID NO: 99252 - protein, 98 aa, Homo sapiens
KHHLGLEEPKKLRPPPARQLLAELASGACFVGLLSSLRASPAVCACRLPANRNWTRSWSGSPPCAFRMSGALWSTSTPCTSPTVTSMACTTSNSARCL

SEQ ID NO: 99253 - protein, 149 aa, Homo sapiens
MAGPGSTGGQIGAAALAGGARSKVAPSVDFDHSCSDSVEYLTLNFGPFETVHRWRRLPPCDEFVGARRSKHTVVAYKDAIYVFGGDNGAFTTGTPPAPRYHHSAVVYGSSMFVFGGYTGDIYSNSNLKNKNDLFEYKFATGQWTEWKIE

SEQ ID NO: 99254 - protein, 530 aa, Homo sapiens
MSGVRAVRISIESACEKQVHEVGLDGTETYLPPLSMSQNLARLAQRIDFSQGSGSEEEEAAGTEGDAQEWPGAGSSADQDDEEGVVKFQPSLWPWDSVRNNLRSALTEMCVLYDVLSIVRDKKFMTLDPVSQDALPPKQNPQTLQLISKKKSLAGAAQILLKGAERLTKSVTENQENKLQRDFNSELLRLRQHWKLRKVGDKILGDLSYRSAGSLFPHHGTFEVIKNTDLDLDKKIPEDYCPLDVQIPSDLEGSAYIKVSIQKQAPDIGDLGTVNLFKRPLPKSKPGLQLSISLCHSSNDKKSQKFATEKQCPEDHLYVLEHNLHLLIREFHKQTLSSIMMPHPASAPFGHKRMRLSGPQAFDKNEINSLQSSEGLLEKIIKQAKHIFLRSRAAATIDSLASRIEDPQIQAHWSNINDVYESSVKVLITSQGYEQICKSIQLQLNIGVEQIRVVHRDGRVITLSYQEQELQDFLLSQMSQHQVHAVQQLAKVMGWQVLSFSNHVGLGPIESIGNASAITVASPSGDYAIS

SEQ ID NO: 99255 - protein, 294 aa, Homo sapiens
MIVNVWYSVNGERLGTYMGHTGAVWCVDADWDTKHVLTGSADNSCRLWDCETGKQLALLKTNSAVRTCGFDFGGNIIMFSTDKQMGYQCFVSFFDLRDPSQIDNNEPYMKIPCNDSKITSAVWGPLGECIIAGHESGELNQYSAKSGEVLVNVKEHSRQINDIQLSRDMTMFVTASKDNTAKLFDSTTLEHQKTFRTERPVNSAALSPNYDHVVLGGGQEAMDVTTTSTRIGKFEARFFHLAFEEEFGRVKGHFGPINSVAFHPDGKSYSSGGEDGYVRIHYFDPQYFEFEFEA

SEQ ID NO: 99256 - protein, 67 aa, Homo sapiens
FCALHGPREKCVEILRSGHLLAISPGGVREALISDETYNIVWGHRRGFAQVAIDAKVALTGMACFHI

SEQ ID NO: 99257 - protein, 322 aa, Homo sapiens
YVLESKLTEFHGAFPDAQLPSKRIIGPKNYEFLKSKREEFQEYLQHPELSNSQLLADFLSPNGGETQFLDKILPDVNLGKIIKSVPGKLMKEKGQHLEPFIMNFINSCESPKPKPSRPELTILSPTSENNKKLFNDLFKNNANRAENTERKQNQNYFMEVMTVEGVYDYLMYVGRVVFQVPDWLHHLLMGTRILFKNTLEMYTDYYLQCKLEQLFQEHRLVSLITLLRDAIFCENTEPRSLQDKQKGAKQTFEEMMNYIPDLLVKCIGEETKYESIRLLFDGLQQPVLNKQLTYVLLDIVIQELFPELNKVQKEVTSVTSWM

SEQ ID NO: 99258 - protein, 73 aa, Homo sapiens
TLPAITLKLGGKGYKLSPEDYTLKVRDKKLLNDLNGAVEDAKTARLFNITSSALAASCIILVFIFLRYPLTDY

SEQ ID NO: 99259 - protein, 102 aa, Homo sapiens
MIRKEAYVHKSVMEELKRIIDDSEITKEDDALWPPPDRVGRQELEIVIGDEHISFTTSKIGSLIDVNQSKDPEGLRVFYYLVQDLKCLVFSLIGLHFKIKPI

SEQ ID NO: 99260 - protein, 127 aa, Homo sapiens
MSHCSGYSDPSSFAEDGPEVLDEEGTQEDLEYKLKGLIDLTLDKSAKTRQAALEGIKNALASKMLYEFILERRMTLTDSIERCLKKGKSDEQRAAAALASVLCIQLGPGIESEEILKTLGPILKKII

SEQ ID NO: 99261 - protein, 237 aa, Homo sapiens
  MOD_RES (1)..(1): Any amino acid
XCIVAPDTVIHCEGEPIKREPPRGILLYGPPGTGKTLIARAVANETGAFFFLINGPEIMSKLAGESESNLRKAFEEAEKNAPAIIFIDELDAIAPKREKTHGEVERRIVSQLLTLMDGLKQRAHVIVMAATNRPNSIDPALRRFGRFDREVDIGIPDATGRLEILQIHTKNMKLADDVDLEQVANETHGHVGADLAALCSEAALQAIRKKMDLIDLEDETIDAEVMNSLAVTMDDFR

SEQ ID NO: 99262 - protein, 129 aa, Homo sapiens
MAAMNKEGGTASVATGPDSPSPVPLPPGKPALPGADGTPFGCPPGRKEKPSDPVEWTVMDVVEYFTEAGFPEQATAFQEQEIDGKSLLLMQRTDVLTGLSIRLGPALKIYEHHIKVLQQGHFEDDDPDG

SEQ ID NO: 99263 - protein, 74 aa, Homo sapiens
MSGPVPSRARVYTDVNTHRPREYWDYESHVVEWGNQDDYQLVRKLGRGKYSEVFEAINITNNEKVVVKILKPVK

SEQ ID NO: 99264 - protein, 296 aa, Homo sapiens
MKCVFVTVGTTSFDDLIACVSAPDSLQKIESLGYNRLILQIGRGTVVPEPFSTESFTLDVYRYKDSLKEDIQKADLVISHAGAGSCLETLEKGKPLVVVINEKLMNNHQLELAKQLHKEGHLFYCTCRVLTCPGQAKSIASAPGKCQDSAALTSTAFSGLDFGLLSGYLHKQALVTATHPTCTLLFPSCHAFFPLPLTPTLYKMHKGWKNYCSQKSLNEASMDEYLGSLGLFRKLTAKDASCLFRAISEQLFCSQVHHLEIRKACVSYMRENQQTFESSGFHSLSLSWKTSNLCHR

SEQ ID NO: 99265 - protein, 81 aa, Homo sapiens
MASPDWGYDDKNGPEQWSKLYPIANGNNQSPVDIKTSETKHDTSLKPISVSYNPATAKEIINVGHSFHVNFEDNDNRSALL

SEQ ID NO: 99266 - protein, 60 aa, Homo sapiens
  MOD_RES (1)..(1): Any amino acid
XGVTGENSNEVAKLVNTLNTIPSLGQSPGPVVVSNNSSAHGSQRTSGPESSMKVLLPRNG

SEQ ID NO: 99267 - protein, 78 aa, Homo sapiens
MSQLHFYRFYLEFGCLRKAFRHKFRLPPPSSDFLADVVGLQTEQRAGDLPKTMEGPLPSNAKAAINLQDDPIIQKYGS

SEQ ID NO: 99268 - protein, 453 aa, Homo sapiens
MTVWILLLLSLYPGFTSQKSDDDYEDYASNKTWVLTPKVPEGDVTVILNNLLEGYDNKLRPDIGVKPTLIHTDMYVNSIGPVNAINMEYTIDIFFAQTWYDRRLKFNSTIKVLRLNSNMVGKIWIPDTFFRNSKKADAHWITTPNRMLRIWNDGRVLYTLRLTIDAECQLQLHNFPMDEHSCPLEFSSYGYPREEIVYQWKRSSVEVGDTRSWRLYQFSFVGLRNTTEVVKTTSGDYVVMSVYFDLSRRMGYFTIQTYIPCTLIVVLSWVSFWINKDAVPARTSLGITTVLTMTTLSTIARKSLPKVSYVTAMDLFVSVCFIFVFSALVEYGTLHYFVSNRKPSKDKDKKKKNPLLRMFSFKAPTIDIRPRSATIQMNNATHLQERDEEYGYECLDGKDCASFFCCFEDCRTGAWRHGRIHIRIAKMDSYARIFFPTAFCLFNLVYWVSYLYL

SEQ ID NO: 99269 - protein, 1012 aa, Homo sapiens
MGKLIRMGPQERWLLRTKRLHWSRLLFLLGMLIIGSTYQHLRRPRGLSSLWAAVSSHQPIKLASRDLSSEEMMMMSSSPSKPSSEMGGKMLVPQASVGSDEATLSMTVENIPSMPKRTAKMIPTTTKNNYSPTAAGTERRKEDTPTSSRTLTYYTSTSSRQIVKKYTPTPRGEMKSYSPTQVREKVKYTPSPRGRRVGTYVPSTFMTMETSHAITPRTTVKDSDITATYKILETNSLKRIMEETTPTTLKGMFDSTPTFLTHEVEANVLTSPRSVMEKNNLFPPRRVESNSSAHPWGLVGKSNPKTPQGTVLLHTPATSEGQVTISTMTGSSPAETKAFTAAWSLRNPSPRTSVSAIKTAPAIVWRLAKKPSTAPSTSTTPTVRAKLTMQVHHCVVVKPTPAMLTTPSPSLTTALLPEELSPSPSVLPPSLPDLHPKGEYPPDLFSVEERRQGWVVLHVFGMMYVFVALAIVCDEYFVPALGVITDKLQISEDVAGATFMAAGGSAPELFTSLIGVFISHSNVGIGTIVGSAVFNILFVIGTCSLFSREILNLTWWPLFRDVSFYILDLIMLILFFLDSLIAWWESLLLLLAYAFYVFTMKWNKHIEVWVKEQLSRRPVAKVMALEDLSKLPSLLTRGSSSTSLHNSTIRSTIYQLMLHSLDPLREVRLAKEKEEESLNQGARAQPQAKAESKPEEEEPAKLPAVTVTPAPVPDIKGDQKENPGGQEDVAEAESTGEMPGEEGETAGEGETEEKSGGETQPEGEGETETQGKGEECEDENEAEGKGDNEGEDEGEIHAEDGEMKGNEGETESQELSAENHGEAKNDEKGVEDGGGSDGGDSEEEEEEEEEQEEEEEEEEQEEEEEEEEEEEEKGNEEPLSLDWPETRQKQAIYLFLLPIVFPLWLTVPDVRRQESRKFFVFTFLGSIMWIAMFSYLMVWWAHQVGETIGISEEIMGLTILAAGTSIPDLITSVIVARKGLGDMAVSSSVGSNIFDITVGVGSCEMFQHGAIH

SEQ ID NO: 99270 - protein, 236 aa, Homo sapiens
MRGVSCLQVLLLLVLACGQPRMSSRIVGGRDGRDGEWPWQASIQHRGAHVCGGSLIAPQWVLTAAHCFPRRALPAEYRVRLGALRLGSTSPRTLSVPVRRVLLPPDYSEDGARGDLALLQLRRPVPLSARVQPVCLPVPGARPPPGTPCRVTGWGSLRPGVPLPEWRPLQGVRVPLLDSRTCDGLYHVGADVPQAERIVLPGSLCAGYPQGHKDACQVCTQPPQPPESPPCAQHPP

SEQ ID NO: 99271 - protein, 54 aa, Homo sapiens
MFPVKVKVEKSELEMAKARNQLDAVLQCLLEKSHMDRERLDEEAGKTPSDTHNK

SEQ ID NO: 99272 - protein, 1047 aa, Homo sapiens
MKGTRAIGSVPERSPAGVDLSLTGLPPPVSRRPGSAATTKPIVRSVSVVTGSEQKRKVLEATGPGGSQAINNLRRSNSTTQVSQPRSGSPRPTEPTDFLMLFEGSPSGKKRPASLSTAPSEKGATWNVLDDQPRGFTLPSNARSSSALDSPAGPRRKECTVALAPNFTANNRSNKGAVGNCVTTMVHNRYTPSERAPPLKSSNQTAPSLNNIIKAATCEGSESSGFGKLPKNVSSATHSARNNTGGSTGLPRRKEVTEEEAERFIHQVNQATVTIQRWYRHQVQRRGAGAARLEHLLQAKREEQRQRSGEGTLLDLHQQKEAARRKAREEKARQARRAAIQELQQKRALRAQKASTAERGPPENPRETRVPGMRQPAQELSPTPGGTAHQALKANNTGGGLPAAGPGDRCLPTSDSSPEPQQPPEDRTQDVLAQDAAGDNLEMMAPSRGSAKSRGPLEELLHTLQLLEKEPDVLPRPRTHHRGRYAWASEVTTEDDASSLTADNLEKFGKLSAFPEPPEDGTLLSEAKLQSIMSFLDEMEKSGQDQLDSQQEGWVPEAGPGPLELGSEVSTSVMRLKLEVEEKKQAMLLLQRALAQQRDLTARRVKETEKALSRQLQRQREHYEATIQRHLAFIDQLIEDKKVLSEKCEAVVAELKQEDQRCTERVAQAQAQHELEIKKLKELMSATEKARREKWISEKTKKIKEVTVRGLEPEIQKLIARHKQEVRRLKSLHEAELLQSDERASQRCLRQAEELREQLEREKEALGQQERERARQRQRAELEELRQQLEESSSALTRALRAEFEKGREEQERRHQMELNTLKQQLELERQAWEAGRTRKEEAWLLNREQELREEIRKGRDKEIELVIHRLEADMALAKEESEKAAESRIKRLRDKYEAELSELEQSERKLQERCSELKGQLGEAEGENLRLQGLVRQKERALEDAQAVNEQLSSERSNLAQVIRQEFEDRLAASEEETRQAKAELATLQARQQLELEEVHRRVKTALARKEEAVSSLRTQHEAAVKRADHLEELLEQHRRPTPSTK

SEQ ID NO: 99273 - protein, 335 aa, Homo sapiens
EDYTQKKWKGLALSQRALHWNMMLENDRSMASLAGRNMMESSELTPKQEIFKGSESSNSTSGGLFGVVPGGTETGDVCEDTFKELEGQPSNEEGSRLESDFLEIIDEDKKKSTKDRYEEYKEVEEHPPLSSSPVEHEGVLKGQKSYRCDECGKAFYWSSHLIGHRRIHTGEKPYECNECGKTFRQTSQLIVHLRTHTGEKPYECSECGKAYRHSSHLIQHQRLHNGEKPYKCNECAKAFNQSSKLFDHQRTHTGEKPYECKECGAAFSRSKNLVRHQFLHTGLPLLLRLECSDVTIGHLSLELLGSRDAPASTSPIVRNTGMCHHARLSFYFYFL

SEQ ID NO: 99274 - protein, 458 aa, Homo sapiens
  MOD_RES (1)..(1): Any amino acid
XDKAIERLLDRNQDETEDTELQGMNEYLSSFKVAQYVVREEEMGEEEEVEREIIKQEESVDPDYWEKLLRHHYEQQQEDLARNLGKGKRIRKQVNYNDGSQEDRDWQDDQSDNQSDYSVASEEGDEDFDERSEAPRRPSRKGLRNDKDKPLPPLLARVGGNIEVLGFNARQRKAFLNAIMRYGMPPQDAFTTQWLVRDLRGKSEKEFKAYVSLFMRHLCEPGADGAETFADGVPREGLSRQHVLTRIGVMSLIRKKVQEFEHVNGRWSMPELAEVEENKKMSQPGSPSPKTPTPSTPGDTQPNTPAPVPPAEDGIKIEENSLKEEESIEGEKEVKSTAPETAIECTQAPAPASEDEKVVVEPPEGEEKVEKAEVKERTEEPMETEPKGAADVEKVEEKSAIDLTPIVVEDKEEKKEEEEKKEVMLQNGETPKDLNDEKQKKNIKQRFMFNIADGGFTE

SEQ ID NO: 99275 - protein, 42 aa, Homo sapiens
MVCSPVTVRIAPPDRRFSRSAIPEQIISSTLSSPSSNAPDPC

SEQ ID NO: 99276 - protein, 135 aa, Homo sapiens
  MOD_RES (1)..(1): Any amino acid
XGARKELQKELQEQMSRGDPFKDIILYVKEEMKKNNIPEPVVIGIVWSSVMSTVEWNKKEELVAEQAIKHLKQYSPLLAAFTTQAEVLSEEPILKWYKDAHVAKGKSVFLEQMKKFVEWLKNAEEESESEAEEGD

SEQ ID NO: 99277 - protein, 47 aa, Homo sapiens
MGDPDLLEVLAEEGEKVNKHIDYSFQMSESLSSRETSFLINEETMER

SEQ ID NO: 99278 - protein, 167 aa, Homo sapiens
MEETQQKSNLELLHISLLLIESRLEPVRFLRSTFTNNLVYDTSDSDDYHLLKDLEEGIQMLMGVRVAPGVPNPGSPLASRAGGEKHCCPLFSSQALTQENSPYSSFPLVNPPGLSLHPEGEGGKWINERGREQCPSAWSLLLLLHFAEAGRRQPPDWADPQADLQQV

SEQ ID NO: 99279 - protein, 328 aa, Homo sapiens
MAYSTVQRVALASGLVLALSLLLPKAFLSRGKRQEPPPTPEGKLGRFPPMMHHHQAPSDGQTPGARFQRSHLAEAFAKAKGSGGGAGGGGSGRGLMGQIIPIYGFGIFLYILYILFKLSKGKTTAEDGKCYTAMPGNTHRKITSFELAQLQEKLKETEAAMEKLINRVGPNGESTQTDHSDVYVHCLGVFTTKWLDCLIFLSRAQTVTSDQEKRLLHQLREITRVMKEGKFIDRFSPEKEAEEAPYMEDWEGYPEETYPIYDLSDCIKRRQETILVDYPDPKELSAEEIAERMGMIEEEESDHLGWESLPTDPRAQEDNSVTSCDPKP

SEQ ID NO: 99280 - protein, 349 aa, Homo sapiens
LNDTLLLGPDPLGNFLSIAVKSIHRKRMPVKEVRGGQTASFALKKIKRSSIRKGMVMVSPRLNPQASWEFEAEILVLHHPTTISPRYQAMVHCGSIRQTATILSMDKDCLRTGDKATVHFRFIKTPEYLHIDQRLVFREGRTKAVGTITKLLQTTNNSPMNSKPQQIKMQSTKKGPLTKRDEGGPSGGPAVGAPPPGDEASSVGAGQPAASSNLQPQPKPSSGGRRRGGQRHKSQVQGANSEFPWRRITALQVDVAGRMGSRRHGHRGKEEGSCWSLLTASSHLLLRRPCPSFSSAWGHRLLSCAPRSQSAEQACGGSGGVLFTHSQMAGSRHQKLPSCCPSGRCLPLC

SEQ ID NO: 99281 - protein, 234 aa, Homo sapiens
MPIVDKLKEALKPGRKDSADDGELGKLLASSAKKVLLQKIEFEPASKSFSYQLEALKSKYVLLNPKTEGASRHKSGDDPPARRQGSEHTYESCGDGVPAPQKVLFPTERLSLRWERVFRVGAGLHNLGNTCFLNATIQCLTYTPPLANYLLSKEHARSCHQGSFCMLCVMQNHIVQAFANSGNAIKPVSFIRDLKKIARHFRFGNQEDAHEFLRYTIDAMQKACLNGCAKIKIE

SEQ ID NO: 99282 - protein, 130 aa, Homo sapiens
MRGSVECTWGWGHCAPSPLLLWTLLLFAAPFGLLGEKTRQVSLEVIPNWLGPLQNLLHIRAVGTNSTLHYVWSSLGPLAVVMVATNTPHSTLSVNWSLLLSPEPDGGLMVLPKDSIQFSSALVFTRGSCC

SEQ ID NO: 99283 - protein, 39 aa, Homo sapiens
MTDNSNNQLVVRAKFNFQQTNEDELSFSKGDVIHVTRVE

SEQ ID NO: 99284 - protein, 47 aa, Homo sapiens
SWGEGPRGPGLGRRDLSSADPAVLGATMESRCYGCAVKFTLFKKEAA

SEQ ID NO: 99285 - protein, 906 aa, Homo sapiens
MVDYHAANQSYQYGPSSAGNGAGGGGSMGDYMAQEDDWDRDLLLDPAWEKQQRKTFTAWCNSHLRKAGTQIENIDEDFRDGLKLMLLLEVISGERLPKPERGKMRVHKINNVNKALDFIASKGVKLVSIGAEEIVDGNAKMTLGMIWTIILRFAIQDISVEETSAKEGLLLWCQRKTAPYKNVNVQNFHISWKDGLAFNALIHRHRPELIEYDKLRKDDPVTNLNNAFEVAEKYLDIPKMLDAEDIVGTLRPDEKAIMTYVSCFYHAFSGAQKAETAANRICKVLAVNQENEHLMEDYEKLASDLLEWIRRTIPWLEDRVPQKTIQEMQQKLEDFRDYRRVHKPPKVQEKCQLEINFNTLQTKLRLSNRPAFMPSEGKMVSDINNGWQHLEQAEKGYEEWLLNEIRRLERLDHLAEKFRQKASIHEAWTDGKEAMLKHRDYETATLSDIKALIRKHEAFESDLAAHQDRVEQIAAIAQELNELDYYDSHNVNTRCQKICDQWDALGSLTHSRREALEKTEKQLEAIDQLHLEYAKRAAPFNNWMESAMEDLQDMFIVHTIEEIEGLISAHDQFKSTLPDADREREAILAIHKEAQRIAESNHIKLSGSNPYTTVTPQIINSKWEKVQQLVPKRDHALLEEQSKQQSNEHLRRQFASQANVVGPWIQTKMEEIGRISIEMNGTLEDQLSHLKQYERSIVDYKPNLDLLEQQHQLIQEALIFDNKHTNYTMEHIRVGWEQLLTTIARTINEVENQILTRDAKGISQEQMQEFRASFNHFDKKQTGSMDSDDFRALLISTGYSLGEAEFNRIMSLVDPNHSGLVTFQAFIDFMSRETTDTDTADQVIASFKVLAGDKNFITAEELRRELPPDQAEYCIARMAPYQGPDAVPGALDYKSFSTALYGESDL

SEQ ID NO: 99286 - protein, 537 aa, Homo sapiens
MASNDKGMAPSLGSPWASQMGPWDAILKAVKDQLPSLDSDSPLSDYGEEELFIFQRNQTSLIPDLSEELAEDPADGDKSRAWVAAAEESLPEVCGTQKSIRLCVCDPVLVPAELATEPGCRQNTRTKDASSQEGRDPGRPFESSGEVSALLGMAEEPPRWLEGDLGSLSFNTKGSQGPPWDPQAEATLSCHEGDPKAEPLSTASQESVNRRALRQERRKMIETDILQKVTRDACGPTSSDKGGVKEAPCHAAESAPRSKMPLVEPPEGPPVLSLQQLEAWDLDDILQSLAGQEDNQGNRAPGTVWWAADHRQVQDRMVPSAHNRLMEQLALLCTTQSKASACARKVPADTPQDTKEADSGSRCASRKQGSQAGPGPQLAQGMRLNAESPTIFIDLRQMELPDHLSPERSGGSSHSSSDSEEEEEEEMAALGDAEGASPSSLGLRTCTGKSQLLQQLRAFQKGTAQPELPASKGPAGGRAQAPEDTAGSRTGRKQHMKLCAKGQSAQARLPRGRPRALGDVPEPGAAREALMPPLEQL

SEQ ID NO: 99287 - protein, 107 aa, Homo sapiens
  MOD_RES (1)..(1): Any amino acid
XTVAAPSVFIFPPSDEQLKSGTASVVCLLNNFYPREAKVQWKVDNALQSGNSQESVTEQDSKDSTYSLSSTLTLSKADYEKHKVYACEVTHQGLSSPVTKSFNRGEC

SEQ ID NO: 99288 - protein, 205 aa, Homo sapiens
  MOD_RES (1)..(1): Any amino acid
XAFMYSDGQSETILGGLGLGLGGGDCRVKIATKANPWDGKSLKPDSVRSQLETSLKRLQCPQVDLFYLHAPDHGTPVEETLHACQRLHQEGKFVELGLSNYASWEVAEICTLCKSNGWILPTVYQLLEGAPLRGHCVGGEGPAGRIWRQRPQCDLGCPPVDVPPLTAAGCPRGRGHPGHVQPGAAGAELGSNRGRAPGAGCRGCL

SEQ ID NO: 99289 - protein, 107 aa, Homo sapiens
MASVSSATFSGHGARSLLQFLRLVGQLKRVPRTGWVYRNVQRPESVSDHMYRMAVMAMVIKDDRLNKDRCVRLALVHDMAECIVGDIAPADNIPKEEKHRREEKRKT

SEQ ID NO: 99290 - protein, 334 aa, Homo sapiens
MLFDYLADKHGFRQEYLDTLYRYAKFQYECGNYSGAAEYLYFFRVLVPATDRNALSSLWGKLASEILMQNWDAAMEDLTRLKETIDNNSVSSPLQSLQQRTWLIHWSLFVFFNHPKGRDNIIDLFLYQPQYLNAIQTMCPHILRYLTTAVITNKDVRKRRQVLKDLVKVIQQESYTYKDPITEFVECLYVNFDFDGAQKKLRECESVLVNDFFLVACLEDFIENARLFIFETFCRIHQCISINMLADKLNMTPEEAERWIVNLIRNARLDAKIDSKLGHVVMGNNAVSPYQQVIEKTKSLSFRSQMLAMNIEKKLNQNSRSEAPNWATQDSGFY

SEQ ID NO: 99291 - protein, 110 aa, Homo sapiens
MNLPVPDPILLTNSHDGLDGPTYKKRRLDECEEAFQGTKVFVMPNGMLKSNQQLVDIIEKVKPEIRLLIEKCNTVKMWVQLLIPRIEDGNNFGVSIQEETVAELRTVESE

SEQ ID NO: 99292 - protein, 94 aa, Homo sapiens
SLDLAEFAKKQPWWRKLFGQESGPSAEKYSVATQLFIGGVTGWCTGFIFQKVGKLAATAVGGGFFLLQLATLTFASLQTILGTSKLTGNEWRRT

SEQ ID NO: 99293 - protein, 89 aa, Homo sapiens
MWAPREQLLGWTAEALPAKDSAWPWEEKPRYLVPVADGALARGVRRIWTLLGSRCDTAFNYSCLSFLDFHHFPETTSWKLRPAGHCWAC

SEQ ID NO: 99294 - protein, 574 aa, Homo sapiens
MASTEGANNMPKQVEVRMHDSHLGSEEPKHRHLGLRLCDKLGKNLLLTLTVFGVILGAVCGGLLRLASPIHPDVVMLIAFPGDILMRMLKMLILPLIISSLITGLSGLDAKASGRLGTRAMVYYMSTTIIAAVLGVILVLAIHPGNPKLKKQLGPGKKNDEVSSLDAFLDLIRNLFPENLVQACFQQIQTVTKKVLVAPPPDEEANATSAVVSLLNETVTEVPEETKMVIKKGLEFKDGMNVLGLIGFFIAFGIAMGKMGDQAKLMVDFFNILNEIVMKLVIMIMWYSPLGIACLICGKIIAIKDLEVVARQLGMYMVTVIIGLIIHGGIFLPLIYFVVTRKNPFSFFAGIFQAWITALGTASSAGTLPVTFRCLEENLGIDKRVTRFVLPVGATINMDGTALYEAVAAIFIAQMNGVVLDGGQIVTVSLTATLASVGAASIPSAGLVTMLLILTAVGLPTEDISLLVAVDWLLDRMRTSVNVVGDSFGAGIVYHLSKSELDTIDSQHRVHEDIEMTKTQSIYDDMKNHRESNSNQCVYAAHNSVIVDECKGTWFSVPSMLYVVMMHAFHFHLG

SEQ ID NO: 99295 - protein, 144 aa, Homo sapiens
  MOD_RES (1)..(1): Any amino acid
XRAAGVGLVDCHCHLSAPDFDRDLDDVLEKAKKANVVALVAVAEHSGEFEKIMQLSERYNGFVLPCLGVHPVQGLPPEDQRSVTLKDLDVALPIIENYKDRLLAIGEVGLDFSPRFAGTGEQKEEQRQVLIRQIQLAKRLNLPV

SEQ ID NO: 99296 - protein, 346 aa, Homo sapiens
MATAERRALGIGFQWLSLATLVLICAGQGGRREDGGPACYGGFDLYFILDKSGSVLHHWNEIYYFVEQLAHKFISPQLRMSFIVFSTRGTTLMKLTEDREQIRQGLEELQKVLPGGDTYMHEGFERASEQIYYENRQGYRTASVIIALTDGELHEDLFFYSEREANRSRDLGAIVYCVGVKDFNETQLARIADSKDHVFPVNDGFQALQGIIHSILKKSCIEILAAEPSTICAGESFQVVVRGNGFRHARNVDRVLCSFKINDSVTLNEKPFSVEDTYLLCPAPILKEVGMKAALQVSMNDGLSFISSSVIITTTHCPPQNCIRPHNSCLHGIAENTACSLRTAHS

SEQ ID NO: 99297 - protein, 1054 aa, Homo sapiens
MKEDAKPSKDNEDAFYNSQKFEVLYCGKVTVTHKKAPSSLIDDCMEKFSLHEQQRLKIQGEQRGPDPGEDLADLEVVVPGSPGDCLPEEADGTDTHLGLPAGASQPALTSSRVCFPERILEDSGFDEQQEFRSRCSSVTGVQRRVHEGSQKSQPRRRHASAPSHVQPSDSEKNRTMLFQVGRFEINLISPDTKSVVLEKNFKDISSCSQGIKHVDHFGFICRESPEPGLSQYICYVFQCASESLVDEVMLTLKQAFSTAAALQSAKTQIKLCEACPMHSLHKLCERIEGLYPPRAKLVIQRHLSSLTDNEQADIFERVQKMKPVSDQEENELVILHLRQLCEAKQKTHVHIGEGPSTISNSTIPENATSSGRFKLDILKNKAKRSLTSSLENIFSRGANRMRGRLGSVDSFERSNSLASEKDYSPGDSPPGTPPASPPSSAWQTFPEEDSDSPQFRRRAHTFSHPPSSTKRKLNLQDGRAQGVRSPLLRQSSSEQCSDGEGRKRTSSTCSNESLSVGGTSVTPRRISWRQRIFLRVASPMNKSPSAMQQQDGLDRNELLPLSPLSPTMEEEPLVVFLSGEDDPEKIEERKKSKELRSLWRKAIHQQILLLRMEKENQKLEASRDELQSRKVKLDYEEVGACQKEVLITWDKKLLNCRAKIRCDMEDIHTLLKEGVPKSRRGEIWQFLALQYRLRHRLPNKQQPPDISYKELLKQLTAQQHAILVDLGRTFPTHPYFSVQLGPGQLSLFNLLKAYSLLDKEVGYCQGISFVAGVLLLHMSEEQAFEMLKFLMYDLGFRKQYRPDMMSLQIQMYQLSRLLHDYHRDLYNHLEENEISPSLYAAPWFLTLFASQFSLGFVARVFDIIFLQGTEVIFKVALSLLSSQETLIMECESFENIVEFLKNTLPDMNTSEMEKIITQVFEMDISKQLHAYEVEYHVLQDELQESSYSCEDSETLEKLERANSQLKRQNMDLLEKLQVAHTKIQALESNLENLLTRETKMKSLIRTLEQEKMAYQKTVEQLRKLLPADALVNCDLLLRDLNCNPNNKAKIGNKP

SEQ ID NO: 99298 - protein, 98 aa, Homo sapiens
MNMSVLTLQEYEFEKQFNENEAIQWMQENWKKSFLFSALYAAFIFGGRHLMNKRAKFELRKPLVLWSLTLAVFRCYNNLKQLTLYSVLFELVLIWCTF

SEQ ID NO: 99299 - protein, 460 aa, Homo sapiens
MEKYERIRVVGRGAFGIVHLCLRKADQKLVIIKQIPVEQMTKEERQAAQNECQVLKLLNHPNVIEYYENFLEDKALMIAMEYAPGGTLAEFIQKRCNSLLEEETILHFFVQILLALHHVHTHLILHRDLKTQNILLDKHRMVVKIGDFGISKILSSKSKAYTVVGTPCYISPELCEGKPYNQKSDIWALGCVLYELASLKRAFEAANLPALVLKIMSGTFAPISDRYSPELRQLVLSLLSLEPAQRPPLSHIMAQPLCIRALLNLHTDVGSVRMRRPVQGQRAVLGGRVWAPSGSTGGLRQRETWGKSSLPACRNVRRVFVLRPPSVLQGREVRGPQQHREQDHQCPLQRYPPGTCEASHPTTTVVSVCLGWWAGHPPAAANAQHRGGPGGSWAHAESRRHALWASHPVGGPTPRCRRRQSPSWGSGAATAPVHLAFPGGPVGCDHQARGLWGLLHCLPD

SEQ ID NO: 99300 - protein, 120 aa, Homo sapiens
MGSVSSALARSRKAVVQSGSLPPQPEAPPAAPVAVGDPFALPKTQRPGPRRGETLSPPVACEAQPAARHREELPKLARQELSPVLKREASMSQPCWPRSRSAAVANEAGDKNARPLARFS

SEQ ID NO: 99301 - protein, 349 aa, Homo sapiens
MYYPVTLDVLHQIFSKFGAVLKIITFTKNNQFQALLQYGDPVNAQQAKLALDGQNIYNACCTLRIDFSKLVNLNVKYNNDKSRDYTRPDLPSGDGQPALDPAIAAAFAKETSLLGLPVAAVPGALSPLAIPNAAAAAAAAAAGRVGMPGVSAGGNTVLLVSNLNEEMVTPQSLFTLFGVYGDVQRVKILYNKKDSALIQMADGNQSQLAMNHLNGQKMYGKIIRVTLSKHQTVQLPREGLDDQGLTKDFGNSPLHRFKKPGSKNFQNIFPPSATLHLSNIPPSVAEEDLRTLFANTGGTVKAFKFFQDHKMALLQMATVEEAIQALIDLHNYNLGENHHLRVSFSKSTI

SEQ ID NO: 99302 - protein, 37 aa, Homo sapiens
MASEDIAKLAETLAKTQVAGGQLSFKGKSLKLNTAED

SEQ ID NO: 99303 - protein, 495 aa, Homo sapiens
MEFCVEDSTDVHVLIEDHRIVFSCKNADGVELYNEIEFYAKVNSKDSQDKRSSRSITCFVRKWKEKVAWPRLTKEDIKLLKKVSTKRPPPAMDDLDFTTTVVSCCPAELQTEGSNGKKEVLSGFQVVLEDTVLFPEGGGQPDDRGTINDISVLRVTRRGEQADHFTQTPLDPGSQVLVRVDWERRFDHMQQHSGQHLITAVADHLFKLKTTSWELGRFRSAIELDTPSMTAEQVAAIEQSVNEKIRDRLPVNVRELSLDDPEVEQVSGRGLPDDHAGPIRVVNIEGVDSNMCCGTHVSNLSDLQVIKILGTEKGKKNRTNLIFLSGNRVLKWMERSHGTEKALTALLKCGAEDHVEAVKKLQNSTKILQKNNLNLLRDLAVHIAHSLRNSPDWGGVVILHRKEGDSEFMNIIANEIGSEETLLFLTVGDEKGGGLFLLAGPPASVETLGPRVAEVLEGKGAGKKGRFQGKATKMSRRMEAQALLQDYISTQSAKE

SEQ ID NO: 99304 - protein, 927 aa, Homo sapiens
MEMPLPPDDQELRNVIDKLAQFVARNGPEFEKMTMEKQKDNPKFSFLFGGEFYSYYKCKLALEQQQLICKQQTPELEPAATMPPLPQPPLAPAAPIPPAQGAPSMDELIQQSQWNLQQQEQHLLALRQEQVTAAVAHAVEQQMQKLLEETQLDMNEFDNLLQPIIDTCTKDAISAGKNWMFSNAKSPPHCELMAGHLRNRITADGAHFELRLHLIYLINDVLHHWALTRGKSLPHSQRKQARELLAALQKVVVPIYCTSFLAVEEDKQQKIARLLQLWEKNGYFDDSIIQQLQSPALGLGQYQATLINEYSSVVQPVQLAFQQQIQTLKTQHEEFVTSLAQQQQQQQQQQQQLQMPQMEAEVKATPPPPAPPPAPAPAPAIPPTTQPDDSKPPIQMPGSSEYEAPGGVQDPAAAGPRGPGPHDQIPPNKPPWFDQPHPVAPWGQQQPPEQPPYPHHQGGPPHCPPWNNSHEGMWGEQRGDPGWNGQRDAPWNNQPDAAWNSQFEGPWNSQHEQPPWGGGQREPPFRMQRPPHFRGPFPPHQQHPQFNQPPHPHNFNRFPPRFMQDDFPPRHPFERPPYPHRFDYPQGDFPAEMGPPHHHPGHRMPHPGINEHPPWAGPQHPDFGPPPHGFNGQPPHMRRQGPPHINHDDPSLVPNVPYFDLPAGLMAPLVKLEDHEYKPLDPKDIRLPPPMPPSERLLAAVEAFYSPPSHDRPRNSEGWEQNGLYEFFRAKMRARRRKGQEKRNSGPSRSRSRSKSRGRSSSRSNSRSSKSSGSYSRSRSRSCSRSYSRSRSRSRSRSRSSRSRSRSQSRSRSKSYSPGRRRRSRSRSPTPPSSAGLGSNSAPPIPDSRLGEENKGHQMLVKMGWSGSGGLGAKEQGIQDPIKGGDVRDKWDQYKGVGVALDDPYENYRRNKSYSFIARMKARDECK

SEQ ID NO: 99305 - protein, 40 aa, Homo sapiens
MEKPRSIERWGVAVLPRLVSNSWVQAIHLPQPPKVLGLQM

SEQ ID NO: 99306 - protein, 192 aa, Homo sapiens
MGRLETADKQSVHIVENEIQASIDQIFSRLERLEILSSKEPPNKRQNARLRVDQLKYDVQHLQTALRNFQHRRHAREQQERQREELLSRTFTTNDSDTTIPMDESLQFNSSLQKVHNGMDDLILDGHNILDGLRTQRLTLKGTQKKILDIANMLGLSNTVMRLIEKRAFQDKYFMIENSILLCCPGWSAIAQ

SEQ ID NO: 99307 - protein, 168 aa, Homo sapiens
MSLDIQSLDIQCEELSDARWAELLPLLQQCQVVRLDDCGLTEARCKDISSALRVNPALAELNLRSNELGDVGVHCVLQGLQTPSCKIQKLRSCTSATTSWGMRACSCSAKDSWTPSAAWKSCSWSIAASRLPAASPWPPCSGPSRTSRSSRLATTTSMRLASVCCARA

SEQ ID NO: 99308 - protein, 104 aa, Homo sapiens
INEILNIRTKGRTWYILSLTLCRFLAWNYFAHLRLEVLQLTRHPENWTLQARWRLVGLPVHLLFLRFYKRDKDEHYRTYDAYSTFYLNSSGLICRHRLDKVSPR

SEQ ID NO: 99309 - protein, 312 aa, Homo sapiens
MPALSTGSGSDTGLYELLAALPAQLQPHVDSQEDLTFLWDMFGEKSLHSLVKHFQERRLALRRPEILVQPLKVSNRKSSGFRKSFRLSRKDKKTNKSMYECKKSDQYDTADVPTYEEVTPYRRQTNEKYRLVVLVGPVGVGLNELKRKLLISDTQHYGVTVPHTTRARRSQESDGVEYIFISKHLFETDVQNNKFIEYGEYKNNYYGTSIDSVRSVLAKNKVCLLDVQPHTVKHLRTLEFKPYVIFIKPPSIERLRETRKNAKIISSRDDQGAAKPFTEEDFQEMIKSAQIMESQYGHLFDKIIINDDLTVA

SEQ ID NO: 99310 - protein, 98 aa, Homo sapiens
MTPQSLLQTTLFLLSLLFLVQASASSGAHGRGHREDFRFCSQRNQTHRSSLHYKPTPDLRISIENSEEALTVHAPFPAAHPASRSFPDPRGLYHFCLY

SEQ ID NO: 99311 - protein, 225 aa, Homo sapiens
MMAQSNMFTVADVLSQDELRKKLYQTFKDRGILDTLKTQLRNQLIHELMHPVLSGELQPRSISVEGSSLLIGASNSLVADHLQRCGYEYSLSVFFPESGLAKEKVFTMQDLLQLIKINPTSSLYKSLVSGSDKENQKGFLMHFLKELAEYHQAKESCNMETQTSSTFNRDSLVEETEVLRGRATWKHSVCIRTNSGVQVLPSMIWSFLYYPAGLQYHPVCQFRAQ

SEQ ID NO: 99312 - protein, 207 aa, Homo sapiens
  MOD_RES (1)..(1): Any amino acid
XVWDALTDNYIPSLSEDWRDPNIEALNGNCSDTETYSIHREVFSNGLMDRINQLPVSLEPTQGRRPEVCLIHEKEEEEFNEKSENDSGINEEPLLTADQVIEEIEEMMQNSPDPEEEEEVLEEEDGGETSSQADSVLLQEMQALTQTFNNNWSYEGLRHMSGSELTELLDQVEGAIRDFSEELVQQLARRDELEFEKEVKNSFITVL

SEQ ID NO: 99313 - protein, 214 aa, Homo sapiens
  MOD_RES (1)..(1): Any amino acid
XSTKYRTEKIYPTATGEKEENVKKNRYKDILPFDHSRVKLTLKTPSQDSDYINANFIKGVYGPKAYVATQGPLANTVIDFWRMIWEYNVVIIVMACREFEMGREDEQARTDYFIRTLLLEFQNESRRLYQFHYVNWPDHDVPSSFDSILDMISLMRKYQEHEDVPICIHCSAGCGRTGAICAIDYTWNLLKAGKIPEEFNVFNLIQEMRTQRHS

SEQ ID NO: 99314 - protein, 191 aa, Homo sapiens
MLAGQLEARDPKEGTHPEDPCPGAGAVMEKTAVAAEVLTEDCNTGEMPPLQQQIIRLHQELGRQKSLWADVHGKLRSHIDALREQNMELREKLRALQLQRWKARKKSAASPHAGQESHTLALEPAFGKISPLSADEETIPKYAGHKNQSATLLGQRSSSNNSAPPKPMSLKIERISSWKTPPQENRDKNLS

SEQ ID NO: 99315 - protein, 357 aa, Homo sapiens
MDRRNDYGYRVPLFQSKHLNGDERSGSNYRRIPWGRRPAPPRDVAILQERANKLVKYLLVKDQTKIPIKRSDMLRDVIQEYDEYFPEIIERASYTLEKMFRVNLKEIDKQSSLYILISTQESSAGILGTTKDTPKLGLLMVILSVIFMNGNKASEAVIWEVLRKLGLRPGVRHSLFGEVRKLITDEFVKQKYLEYKRVPNSRPPEYEFFWGLRSYHETSKMKVLKFACRVQKKDPKDWAVQYREAVEMEVQLQLWLWLRLKPGLSGSNTSTGFTGEPSTSTGFSSGPSSIVGFSGGPSTGVGFCSGPSTSGFSGGPSTGAGFGGGPNTGAGFGGGPSTSAGFGSGAASLGACGFSYG

SEQ ID NO: 99316 - protein, 153 aa, Homo sapiens
MQRRRRPPPPTSRLPEGCGGGGGGSEEVEVQFSAGRWGSAAAVSAAAAAATRSTEEEEERLEREHFWKIINAFRYYGTSMHERVNRTERQFRSLPANQQKLLPQFLLHLDKIRKCIDHNQEILLTIVNDCIHMFENKEYGEDVCESLFYFCLF

SEQ ID NO: 99317 - protein, 103 aa, Homo sapiens
MVLEAHDAQGDVPVTVTVHDFPGKKLVLSSEKTVLTPATNHMGNVTFTIPANREFKSEKGRNKFVTVQATFGTQVVEKVVLVSLQSGYLFIQTDKTIYTPGST

SEQ ID NO: 99318 - protein, 185 aa, Homo sapiens
MAAPRVFPLSCAVQQYAWGKMGSNSEVARLLASSDPLAQIAEDKPYAEILDNRISQKTLSQWIAENQDSLGSKVKDTFNGNLPFLFKVLSVETPLSIQAHPNKELAEKLHLQAPQHYPDANHKPEMAIALTPFQGLCGFRPVEEIVTFLKKVPEFQFLIGDEAATHLKQTMSHDSQAVASSLQSC

SEQ ID NO: 99319 - protein, 277 aa, Homo sapiens
MRWQLSEQLRCLELQGELRRELLQELAEFMRRRAEVELEYSRGLEKLAERFSSRGGRLGSSREHQSFRKEPSLLSPLHCWAVLLQHTRQQSRESAALSEVLAGPLAQRLSHIAEDVGRLVKKSRDLEQQLQDELLEVVSELQTAKKTYQAYHMESVNAEAKLREAERQEEKRAGRSVPTTTAGATEAGPLRKSSLKKGGRLVEKRQAKFMEHKLKCTKARNEYLLSLASVNAAVSNYYLHDVLDLMDCCDTGFHLALGQVLRSYTAAESRTQASQVQ

SEQ ID NO: 99320 - protein, 389 aa, Homo sapiens
MKNLLTEKCISSHNFHQKVIKQRMEKKVDSRYFKDGAVKKPYSAKTLSNKKSSASFGIRRELPSTSHLVQYRGTHTCTRQGRLRELRIRCVARKFLYLWIRMTFGRVFPSKARFYYEQRLLRKVFEEWKEEWWVFQHEWKLCVRADCHYRYYLYNLMFQTWKTYVRQQQEMRNKYIRAEVHDAKQKMRQAWKSWLIYVVVRRTKLQMQTTALEFRQRIILRVWWSTWRQRLGQVRVSRALHASALKHRALSLQVQAWSQWREQLLYVQKEKQKVVSAVKHHQHWQKRRFLKAWLEYLQVRRVKRQQNAATGQSGWSFPAESPACCLPHMEQTLAMAPPGKCPQCKSNTFPQGDIREASIFSLEAEDVSASRKPPGRENGHPSRRATASV

SEQ ID NO: 99321 - protein, 659 aa, Homo sapiens
  MOD_RES (1)..(1): Any amino acid
XQRVRENQKNFSLLQYQCDLKNSKGKITVVQDTPEILRVKENQKNFSSVLYKEDVSPGTAIGKTPEMMRVKQTQDHISSVKYKEAIGQGTPIPDLPEVKRVKETQKHISSVMYKENLGTGIPTTVTPEIERVKRNQENFSSVLYKENLGKGIPTPITPEMERVKRNQENFSSVLYKENLGTGIPIPITPEMQRVKHNQENLSSVLYKENMGKGTPLPVTPEMERVKHNQENISSVLYKENMGKGTPLPVTPEMERVKHNQENISSVLYKENMGKGTPLAVTPEMERVKHNQENISSVLYKENVGKATATPVTPEMQRVKRNQENISSVLYKENLGKATPTPFTPEMERVKRNQENFSSVLYKENMRKATPTPVTPEMERAKRNQENISSVLYSDSFRKQIQGKAAYVLDTPEMRRVRETQRHISTVKYHEDFEKHKGCFTPVVTDPITERVKKNMQDFSDINYRGIQRKVVEMEQKRNDQDQETITGLRVWRTNPGSVFDYDPAEDNIQSRSLHMINVQAQRRSREQSRSASALSISGGEEKSEHSEAPDHHLSTYSDGGVFAVSTAYKHAKTTELPQQRSSSVATQQTTVSSIPSHPSTAGKIFRAMYDYMAADADEVSFKDGDAIINVQAIDEGWMYGTVQRTGRTGMLPANYVEAI

SEQ ID NO: 99322 - protein, 72 aa, Homo sapiens
MATPMHRLIARRQAFDTELQPVKTFWILIQPSIVIRDSVAQAGLKLLSSGDPALASQSARIIGVSHCVQPHT

SEQ ID NO: 99323 - protein, 68 aa, Homo sapiens
WFFKLPHKDGNSCNVGSPFAKDFLPKMEDGTLQAGPGGASGPRALEINKMISFWRNAHKRISPLLSAY

SEQ ID NO: 99324 - protein, 258 aa, Homo sapiens
MADAGIRRVVPSDLYPLVLGFLRDNQLSEVANKFAKATGAKGVKPQAKAAKAPPKKAKSSDSDSDSSSEDEPPKNQKPKITPVTVKAQTKAPPKPARAAPKIANGKAASSSSSSSSSSSSDDSEEEKAAATPKKTVPKKQVVAKAPVKAATTPTRKSSSSEDSSSDEEEEQKKPMKNKPGPYSSVPPPSAPPPKKSLGTQPPKKAVEKQQPVESSEDSSDESDSDSSEDDEAPSKPAGTTKNSSNKPAVTTKSPAVKP

SEQ ID NO: 99325 - protein, 242 aa, Homo sapiens
MFPQSRHPTPHQAAGQPFKFTIPESLDRIKEEFQFLQAQYHSLKLECEKLASEKTEMQRHYVMYYEMSYGLNIEMHKQTEIAKRLNTICAQVIPFLSQEHQQQVAQAVERAKQVTMAELNAIIGVRGLPGLPPTQQQLQAQHLSHGHGPPVPLTPHPSGLQPPGIPPLGGSAGLLALSSALSGQSHLAIKDDKKHHDAEHHRDREPGTSNSLLVPDSLRGTDKRRNGPEFSNDIKKRKVDDK

SEQ ID NO: 99326 - protein, 1105 aa, Homo sapiens
MLNGAGLDKALKMSLPRRSRIRSSVGPVRSSLGYKKAEDEMSRATSVGDQLEAPARTIYLNQPHLNKFRDNQISTAKYSVLTFLPRFLYEQIRRAANAFFLFIALLQQIPDVSPTGRYTTLVPLIIILTIAGIKEIVEDFKRHKADNAVNKKKTIVLRNGMWHTIMWKEVAVGDIVKVVNGQYLPADVVLLSSSEPQAMCYVETANLDGETNLKIRQGLSHTADMQTREVLMKLSGTIECEGPNRHLYDFTGNLNLDGKSLVALGPDQILLRGTQLRNTQWVFGIVVYTGHDTKLMQNSTKAPLKRSNVEKVTNVQILVLFGILLVMALVSSAGALYWNRSHGEKNWYIKKMDTTSDNFGYNLLTFIILYNNLIPISLLVTLEVVKYTQALFINWDTDMYYIGNDTPAMARTSNLNEELGQVKYLFSDKTGTLTCNIMNFKKCSIAGVTYGHFPELAREPSSDDFCRMPPPCSDSCDFDDPRLLKNIEDRHPTAPCIQEFLTLLAVCHTVVPEKDGDNIIYQASSPDEAALVKGAKKLGFVFTARTPFSVIIEAMGQEQTFGILNVLEFSSDRKRMSVIVRTPSGRLRLYCKGADNVIFERLSKDSKYMEETLCHLEYFATEGLRTLCVAYADLSENEYEEWLKVYQEASTILKDRAQRLEECYEIIEKNLLLLGATAIEDRLQAGVPETIATLLKAEIKIWVLTGDKQETAINIGYSCRLVSQNMALILLKEDSLDATRAAITQHCTDLGNLLGKENDVALIIDGHTLKYALSFEVRRSFLDLALSCKAVICCRVSPLQKSEIVDVVKKRVKAITLAIGDGANDVGMIQTAHVGVGISGNEGMQATNNSDYAIAQFSYLEKLLLVHGAWSYNRVTKCILYCFYKNVVLYIIELWFAFVNGFSGQILFERWCIGLYNVIFTALPPFTLGIFERSCTQESMLRFPQLYKITQNGEGFNTKVFWGHCINALVHSLILFWFPMKALEHDTVLTSGHATDYLFVGNIVYTYVVVTVCLKAGLETTAWTKFSHLAVWGSMLTWLVFFGIYSTIWPTIPIAPDMRGQLTCMVCPDTSTQTLAGYCPPCCTAGPCAPEPHSSSAAPHTGNCI

SEQ ID NO: 99327 - protein, 181 aa, Homo sapiens
  MOD_RES (1)..(1): Any amino acid
XIKAFTALRFLSEPSDAVTMRGGNVLLDCSAESDRGVPVIKWKKDGIHLALGMDERKQQLSNGSLLIQNILHSRHHKPDEGLYQCEASLGDSGSIISRTAKVAVAGANIRILPRRSTSSCAAVWKMYPRALEYAQNSIWEGLVTVQSFPFYIYRDIVYFQMISRKLNCSDSVILNDLMIFI

SEQ ID NO: 99328 - protein, 127 aa, Homo sapiens
MGVQGLWKLLECSGRQVSPEALEGKILAVDISIWLNQALKGVRDRHGNSIENPHLLTLFHRLCKLLFFRIRPIFVFDGDAPLLKKQTLVKRRQRKDLASSDSRKTTEKLLKTFLKRQAIKTAFRSKR

SEQ ID NO: 99329 - protein, 428 aa, Homo sapiens
MMLLGQVKYGLHNIQISHLSIASSQVELVEAKSIDVSIQNVSVVFKGTLKYGYTTAWWLGIDQSIDFEIDSAIDLQINTQLTCDSGRVRTDAPDCYLSFHKLLLHLQGEREPGWIKQLFTNFISFTLKLVLKGQICKEINVISNIMADFVQTRAASILSDGDIGVDISLTGDPVITASYLESHHKGHFIYKNVSEDLPLPTFSPTLLGDSRMLYFWFSERVFHSLAKVAFQDGRLMLSLMGDEFKAVLETWGFNTNQEIFQEVVGGFPSQAQVTVHCLKMPKISCQNKGVVVNSSVMVKFLFPRPDQQHSVAYTFEEDIVTTVQASYSKKKLFLSLLDFQITPKTVSNLTESSSESVQSFLQSMITAVGIPEVMSRLEVVFTALMNSKGVSLFDIINPEIITRDGFLLLQMDFGFPEHLLVDFLQSLS

SEQ ID NO: 99330 - protein, 121 aa, Homo sapiens
LEVEYELPPVSVQGSSVIFRTVEVTLHKEGNTFGFVIRGGAHDDRNKSRPVVITCVRPGGPADREGTIKPGDRLLSVDGIRLLGTTHAEAMSILKQCGQEAALLIEYDVSVMGESCPNQRL

SEQ ID NO: 99331 - protein, 125 aa, Homo sapiens
MAAPRVFPLSCAVQQYAWGKMGSNSEVARLLASSDPLAQIAEDKPYAELWMGTHPRGDAKILDNRISQKTLSQWIAENQDSLGSKVLALDSASILLMVQGTVIASTPTTQTPIPLQRGGVLFIGA

SEQ ID NO: 99332 - protein, 222 aa, Homo sapiens
MDLSALRVEEVQNVINAMQKILECPICLELIKEPVSTKCDHIFCKFCMLKLLNQKKGPSQCPLCKNDITKRSLQESTRFSQLVEELLKIICAFQLDTGLEYANSYNFAKKENNSPEHLKDEVSIIQSMGYRNRAKRLLQSEPENPSLETSLSVQLSNLGTVRTLRTKQRIQPQKTSVYIELGSDSSEDTVNKATYCSVGDQELLQITPQGTRDEISLDSAKK

SEQ ID NO: 99333 - protein, 695 aa, Homo sapiens
MGITSLLANGVYAAAYPLHDGDYNGENVEFNDRKLLYEEWARYGVFYKYQPIDLVRKYFGEKIGLYFAWLGVYTQMLIPASIVGIIVFLYGCATMDENIPSMEMCDQRHNITMCPLCDKTCSYWKMSSACATARASHLFDNPATVFFSVFMALWAATFMEHWKRKQMRLNYRWDLTGFEEEEEAVKDHPRAEYEARVLEKSLKKESRNKETDKVKLTWRDRFPAYLTNLVSIIFMIAVTFAIVLGVIIYRISMAAALAMNSSPSVRSNIRVTVTATAVIINLVVIILLDEVYGCIARWLTKIEVPKTEKSFEERLIFKAFLLKFVNSYTPIFYVAFFKGRFVGRPGDYVYIFRSFRMEECAPGGCLMELCIQLSIIMLGKQLIQNNLFEIGIPKMKKLIRYLKLKQQSPPDHEECVKRKQRYEVDYNLEPFAGLTPEYMEMIIQFGFVTLFVASFPLAPLFALLNNIIEIRLDAKKFVTELRRPVAVRAKDIGIWYNILRGIGKLAVIINAFVISFTSDFIPRLVYLYMYSKNGTMHGFVNHTLSSFNVSDFQNGTAPNDPLDLGYEVQICRYKDYREPPWSENKYDISKDFWAVLAARLAFVIVFQNLVMFMSDFVDWVIPDIPKDISQQIHKEKVLMVELFMREEQDKQQLLETWMEKERQKDEPPCNHHNTKACPDSLGSPAPSHAYHGGVL

SEQ ID NO: 99334 - protein, 156 aa, Homo sapiens
MAGSDAEWVTIANNLLFKCHIHLRIHELQDCDANVFIALYQSILGEKVPDLIVIPRSQEDDAHNVQAVIDSLALDYLQVSLSHITGENIVKGDKESIKNLLEIFDGLLEYLTERISETSHEKSKFKNGNLVWFTFYDVSLLPFIFLCIFLHRKQIH

SEQ ID NO: 99335 - protein, 199 aa, Homo sapiens
MGGSALNQGVLEGDDAPGQSLYERLSQRMLDISGDRGVLKDVIREGAGDLVAPDASVLVKYSGYLEHMDRPFDSNYFRKTPRLMKLGEDITLWGMELGLLSMRRGELARFLFKPNYAYGTLGCPPLIPPNTTVLFEIELLDFLDCAESDKFCALSAEQQDQFPLQKVLKVAATEREFGNYLFRQNRFYDAKAPCWVCCG

SEQ ID NO: 99336 - protein, 164 aa, Homo sapiens
  MOD_RES (1)..(1): Any amino acid
XIGDALREKIQVLGSLVSLEMGKILVEGVGEVQEYVDICDYAVGLSRMIGGPILPSERSGHALIEQWNPVGLVGIITAFNFPVAVYGWNNAIAMICGNVCLWKGAPTTSLISVAVTKIIAKVLEDNKLPGAICSLTCGGADIGEKSVGTWRKQCHYCVCAFLSL

SEQ ID NO: 99337 - protein, 339 aa, Homo sapiens
MSVDNLATVIGVNLIRSKVEDPAVIMRGTPQIQRVMTMMIRDHEVLFPKSKDIPLSPPAQKNDPKKAPVARSSVGWDATEDLRISRTDSFSSMTSDSDTTSPTGQQPSDAFPEDSSKVPREKPGDWKMQSRKRTQTLPNRKCFLTSAFQGANSSKMEIFKNEFWSPSSEAKAGEGHRRTMSQDLRQLSDSQRTSTYDNVPSLPGSPGEEASALSSQACDSKGDTLASPNSETGPGKKNSGEEEIDSLQRMVQELRKEIETQKQMYEEQIKNLEKENYDVWAKVVRLNEELEKEKKKSAALEISLRNMERSREDVEKRNKALEEEVKEFVKSMKEPKTEA

SEQ ID NO: 99338 - protein, 30 aa, Homo sapiens
  MOD_RES (1)..(1): Any amino acid
XEVIRKRLLIDGDGAGDDRRINLLVKSFIK

SEQ ID NO: 99339 - protein, 41 aa, Homo sapiens
MAKNGLVICILVITLLLDQTTSHTSRLKARKHSKRRVRGIC

SEQ ID NO: 99340 - protein, 52 aa, Homo sapiens
  MOD_RES (1)..(1): Any amino acid
XDSDPAPAFSKAPGSAGHYELPWVEKYRPVKLNEIVGNEDTVSRLESSRSKF

SEQ ID NO: 99341 - protein, 595 aa, Homo sapiens
MDVLQRTPGSNAEESSILETVTAVAAGKPLSCPNHDGNVMEFYCQSCETAMCRECTEGEHAEHPTVPLKDVVEQHKASLQVQLDAVNKRLPEIDSALQFISEIIHQLTNQKASIVDDIHSTFDELQKTLNVRKSVLLMELEVNYGLKHKVLQSQLDTLLQGQESIKSCSNFTAQALNHGTETEVLLVKKQMSEKLNELADQDFPLHPRENDQLDFIVETEGLKKSIHNLGTILTTNAVASETVATGEGLRQTIIGQPMSVTITTKDKDGELCKTGNAYLTAELSTPDGSVADGEILDNKNGTYEFLYTVQKEGDFTLSLRLYDQHIRGSPFKLKVIRSADVSPTTEGVKRRVKSPGSGHVKQKAVKRPASMYSTGKRKENPIEDDLIFRVGTKGRNKGEFTNLQGVAASTNGKILIADSNNQCVQIFSNDGQFKSRFGIRGRSPGQLQRPTGVAVHPSGDIIIADYDNKWVSIFSSDGKFKTKIGSGKLMGPKGVSVDRNGHIIVVDNKACCVFIFQPNGKIVTRFGSRGNGDRQFAGPHFAAVNSNNEIIITDFHNHSVKVLQAHELLLTFNCFYGEIGLRENNAILTYGTKGS

SEQ ID NO: 99342 - protein, 51 aa, Homo sapiens
MQLRHIGDNIDHRMVREDLQQDGRDALDHFVFFFFRRVQVLLHFFWNNHLL

SEQ ID NO: 99343 - protein, 184 aa, Homo sapiens
MAAAAAAAPSGGGGGGEEERLEEKSEDQDLQGLKDKPLKFKKVKKDKKEEKEGKHEPVQPSAHHSAEPAEAGKAETSEGSGSAPAVPEASASPKQRRSIIRDRGPMYDDPTLPEGWTRKLKQRKSGRSAGKYDVYLINPQGKAFRSKVELIAYFEKLQELAEAGDAPKGAAPRDPRRPRQRVCR

SEQ ID NO: 99344 - protein, 133 aa, Homo sapiens
MSTIGSFEGFQAVSLKQEGDDQPSETDHLSMEEEDPMPRQISRQSSVTESTLYPNPYHQPYISRKYFATRPGAIETAMEDLKGHVAETSGETIQGFWLLTKTDPLSQHQGEHLDTLWNFKKYDMMAIKWLFSR

SEQ ID NO: 99345 - protein, 170 aa, Homo sapiens
MSGMEATVTIPIWQNKPHGAARSVVRRIGTNLPLKPCARASFETLPNISDLCLRDVPPVPTLADIAWIAADEEETYARVRSDTRPLRHTWKPSPLIVMQRNASVPNLRGSEERLLALKKPALPALSRTTELQDELSHLRSQIAKIVAADAASASLTPDFLSPGSSNVSSP

SEQ ID NO: 99346 - protein, 893 aa, Homo sapiens
MITSAAGIISLLDEDEPQLKEFALHKLNAVVNDFWAEISESVDKIEVLYEDEGFRSRQFAALVASKVFYHLGAFEESLNYALGAGDLFNVNDNSEYVETIIAKCIDHYTKQCVENADLPEGEKKPIDQRLEGIVNKMFQRCLDDHKYKQAIGIALETRRLDVFEKTILESNDVPGMLAYSLKLCMSLMQNKQFRNKVLRVLVKIYMNLEKPDFINVCQCLIFLDDPQAVSDILEKLVKEDNLLMAYQICFDLYESASQQFLSSVIQNLRTVGTPIASVPGSTNTGTVPGSEKDSDSMETEEKTSSAFVGKTPEASPEPKDQTLKMIKILSGEMAIELHLQFLIRNNNTDLMILKNTKDAVRNSVCHTATVIANSFMHCGTTSDQFLRDNLEWLARATNWAKFTATASLGVIHKGHEKEALQLMATYLPKDTSPGSAYQEGGGLYALGLIHANHGGDIIDYLLNQLKNASNDIVRHGGSLGLGLAAMGTARQDVYDLLKTNLYQDDAVTGEAAGLALGLVMLGSKNAQAIEDMVGYAQETQHEKILRGLAVGIALVMYGRMEEADALIESLCRDKDPILRRSGMYTVAMAYCGSGNNKAIRRLLHVAEAINLLEPMTNDPVNYVRQGALIASALIMIQQTEITCPKVNQFRQLYSKVINDKHDDVMAKFGAILAQGILDAGGHNVTISLQSRTGHTHMPSVVGVLVFTQFWFWFPLSHFLSLAYTPTCVIGLNKDLKMPKVQYKSNCKPSTFAYPAPLEVPKEKEKEKVSTAVLSITAKAKKKEKEKEKKEEEKMEVDEAEKKEEKEKKKEPEPNFQLLDNPARVMPAQLKVLTMPETCRYQPFKPLSIGGIIILKDTSEDIEELVEPVAAHGPKIEEEEQEPEPPEPFEYIDD

SEQ ID NO: 99347 - protein, 387 aa, Homo sapiens
  MOD_RES (1)..(1): Any amino acid
XDYVSDFKLAPNQTKELEEKVMELHKSYRSMTPAQADLEFLENAKKLSMYGVDLHKAKDLEGVDIILGVCSSGLLVYKDKLRINRFPWPKVLKISYKRSSFFIKIRPGEQEQYESTIGFKLPSYRAAKKLWKVCVEHHTFFRLTSTDTIPKSKFLALGSKFRYSGRTQAQTRQASALIDRPAPHFERTASKRASRSLDGAAAVDSADRSPRPTSAPAITQGQVAEGGVLDASAKKTVVPKAQKETVKAEVKKEDEPPEQAEPEPTEAWKDLDKSQEEIKKHHASISELKKNFMESVPEPRPSEWDKRLSTHSPFRTLNINGQIPTGEGVKKTSVLPSERKVGGPESPSYFLPDTYHLGVCKEPVLNFQTDQRRLAQLRELRAKFFLS

SEQ ID NO: 99348 - protein, 168 aa, Homo sapiens
MRDGRYCRRAVLKPGPLSRAGYLRTGRRLDFVHHSGVFFLQTLLWILCATVCGTEQYFNVEVWLQKYGYLPPTDPRMSVLRSAETMQSALAAMQQFYGINMTGKVDRNTIDWMKKPRCGVPDQTRGSSKFHIRRKRYALTGQKWQHKHITYSIKNVTPKVGDPETRKA

SEQ ID NO: 99349 - protein, 759 aa, Homo sapiens
MTWVKIVFGVATSAVLALLVMCIVLRPSRVHNSEENTMRALTLKDILNGTFSYKTFFPNWISGQEYLHQSADNNIVLYNIETGQSYTILSNRTMKSVNASNYGLSPDRQFVYLESDYSKLWRYSYTATYYIYDLSNGEFVRGNELPRPIQYLCWSPVGSKLAYVYQNNIYLKQRPGDPPFQITFNGRENKIFNGIPDWVYEEEMLATKYALWWSPNGKFLAYAEFNDTDIPVIAYSYYGDEQYPRTINIPYPKAGAKNPVVRIFIIDTTYPAYVGPQEVPVPAMIASSDYYFSWLTWVTDERVCLQWLKRVQNVSVLSICDFREDWQTWDCPKTQEHIEESRTGWAGGFFVSTPVFSYDAISYYKIFSDKDGYKHIHYIKDTVENAIQITSGKWEAINIFRVTQDSLFYSSNEFEEYPGRRNIYRISIGSYPPSKKCVTCHLRKERCQYYTASFSDYAKYYALVCYGPGIPISTLHDGRTDQEIKILEENKELENALKNIQLPKEEIKKLEVDEITLWYKMILPPQFDRSKKYPLLIQVYGGPCSQSVRSVFAVNWISYLASKEGMVIALVDGRGTAFQGDKLLYAVYRKLGVYEVEDQITAVRKFIEMGFIDEKRIAIWGWSYGGYVSSLALASGTGLFKCGIAVAPVSSWEYYASVYTERFMGLPTKDDNLEHYKNSTVMARAEYFRNVDYLLIHGTADDNVHFQNSAQIAKALVNAQVDFQAMWYSDQNHGLSGLSTNHLYTHMTHFLKQCFSLSD

SEQ ID NO: 99350 - protein, 149 aa, Homo sapiens
MGITLHLLLHSDRDPIPDVPAVYFVMPTEENIDRMCQDLRNQLYESYYLNFISAISRSKLEDIANAALAASAVTQVAKVFDQYLNFITLEDDMFVLCNQNKELVSYRAINRPDITDTEMETVMDTIVDSLFCFFVTLGLGDTCASLLHG

SEQ ID NO: 99351 - protein, 113 aa, Homo sapiens
MNAAVRAVVRMGIYVGAKVYFIYEGYQGMVDGGSNIAEADWESVSSILQVGGTIIGSARCQAFRTREGRLKAACNLLQRGITNLCVIGGDGSLTGANLFRKEWSGLLEELARN

SEQ ID NO: 99352 - protein, 100 aa, Homo sapiens
MPRRGLVAGPDLEYFQRRYFTPAEVGVLESIWEILHRYLPYNSHAASYTWKYEGKNLNMDFTLEENGIRDEEEEFDYLSMDGTLHTPAILLYFNDDLTEL

SEQ ID NO: 99353 - protein, 85 aa, Homo sapiens
MGITLIWCLALVLIKWITSKRRGAISYDSSDQTALYIRMLGDVRVRSRAGFESERRGSHPYIDFRIFHSQSEIEVSVSARNIRRL

SEQ ID NO: 99354 - protein, 1645 aa, Homo sapiens
MLKRKQSSRVEAQPVTDFGPDESLSDNADILWINKPWVHSLLRICAIISVISVCMNTPMTFEHYPPLQYVTFTLDTLLMFLYTAEMIAKMHIRGIVKGDSSYVKDRWCVFDGFMVFCLWVSLVLQVFEIADIVDQMSPWGMLRIPRPLIMIRAFRIYFRFELPRTRITNILKRSGEQIWSVSIFLLFFLLLYGILGVQMFGTFTYHCVVNDTKPGNVTWNSLAIPDTHCSPELEEGYQCPPGFKCMDLEDLGLSRQELGYSGFNEIGTSIFTVYEAASQEGWVFLMYRAIDSFPRWRSYFYFITLIFFLAWLVKNVFIAVIIETFAEIRVQFQQMWGSRSSTTSTATTQMFHEDAAGGWQLVAVDVNKPQGRAPACLQKMMRSSVFHMFILSMVTVDVIVAASNYYKGENFRRQYDEFYLAEVAFTVLFDLEALLKIWCLGFTGYISSSLHKFELLLVIGTTLHVYPDLYHSQFTYFQVLRVVRLIKISPALEDFVYKIFGPGKKLGSLVVFTASLLIVMSAISLQMFCFVEELDRFTTFPRAFMSMFQILTQEGWVDVMDQTLNAVGHMWAPVVAIYFILYHLFATLILLSLFVAVILDNLELDEDLKKLKQLRKSVFSIRARNLLEKETAVTKILRACTRQRMLSGSFEGQPAKERSILSVQHHIRQERRSLRHGSNSQRISRGKSLETLTQDHSNTVRYRNAQREDSEIKMIQEKKEQAEMKRKVQEEELRENHPYFDKPLFIVGREHRFRNFCRVVVRARFNASKTDPVTGAVKNTKYHQLYDLLGLVTYLDWVMIIVTICSCISMMFESPFRRVMHAPTLQIAEYVFVIFMSIELNLKIMADGLFFTPTAVIRDFGGVMDIFIYLVSLIFLCWMPQNVPAESGAQLLMVLRCLRPLRIFKLVPQMRKVVRELFSGFKEIFLVSILLLTLMLVFASFGVQLFAGKLAKCNDPNIIRREDCNGIFRINVSVSKNLNLKLRPGEKKPGFWVPRVWANPRNFNFDNVGNAMLALFEVLSLKGWVEVRDVIIHRVGPIHGIYIHVFVFLGCMIGLTLFVGVVIANFNENKGTALLTVDQRRWEDLKSRLKIAQPLHLPPRPDNDGFRAKMYDITQHPFFKRTIALLVLAQSVLLSVKWDVEDPVTVPLATMSVVFTFIFVLEVTMKIIAMSPAGFWQSRRNRYDLLVTSLGVVWVVLHFALLNAYTYMMGACVIVFRFFSICGKHVTLKMLLLTVVVSMYKSFFIIVGMFLLLLCYAFAGVVLFGTVKYGENINRHANFSSAGKAITVLFRIVTGEDWNKIMHDCMVQPPFCTPDEFTYWATDCGNYAGALMYFCSFYVIIAYIMLNLLVAIIVENFSLFYSTEEDQLLSYNDLRHFQIIWNMVDDKREGVIPTFRVKFLLRLLRGRLEVDLDKDKLLFKHMCYEMERLHNGGDVTFHDVLSMLSYRSVDIRKSLQLEELLAREQLEYTIEEEVAKQTIRMWLKKCLKRIRAKQQQSCSIIHSLRESQQQELSRFLNPPSIETTQPSEDTNANSQDNSMQPETSSQQQLLSPTLSDRGGSRQDAADAGKPQRKFGQWRLPSAPKPISHSVSSVNLRFGGRTTMKSVVCKMNPMTDAASCGSEVKKWWTRQLTVESDESGDDLLDI

SEQ ID NO: 99355 - protein, 253 aa, Homo sapiens
MRPAALRGALLGCLCLALLCLGGADKRLRDNHEWKKLIMVQHWPETVCEKIQNDCRDPPDYWTIHGLWPDKSEGCNRSWPFNLEEIKDLLPEMRAYWPDVIHSFPNRSRFWKHEWEKHGTCAAQVDALNSQKKYFGRSLELYRELDLNSVLLKLGIKPSINYYQVADFKDALARVYGVIPKIQCLPPSQDEEVQTIGQIELCLTKQDQQLQNCTEPGEQPSPKQEVWLANGAAESRGLRVCEDGPVFYPPPKK

SEQ ID NO: 99356 - protein, 143 aa, Homo sapiens
  MOD_RES (1)..(1): Any amino acid
XPCSFVAIGILVAFFLLIQACPWTYYVYGLLPLPIWYAVLREFQVIQDLVVSVLTYPLSHFVGYLLAFTLGIEVLVLSFFYRYMLTAGLTAFAAWPFLTRLWTRAKMTSLSWTFFSLLLAVFPLMPVVGRKPDISLVILKECI

SEQ ID NO: 99357 - protein, 120 aa, Homo sapiens
  MOD_RES (1)..(1): Any amino acid
XLSEIEPNVFLRPFLEVIRSEDTTGPITGLALTSVNKFLSYALIAITRLLPQKVTSFILPPAVIENFYFLTLSSALNIISFICANLIPPMRAQQRAWRTWQMLSPMLVLWARILPVMKLS

SEQ ID NO: 99358 - protein, 126 aa, Homo sapiens
MGCRDVHAATVLSFLCGIASVAGLFAGTLLPNWRKLRLITFNRNEKNLTVYTGLWVKCARYDGSSDCLMYDTTWYSSVDQLDLRVLQFALPLSMLIAMGALLLCLIGMCNTAFRSSVPNIKLAKCL

SEQ ID NO: 99359 - protein, 129 aa, Homo sapiens
MKGFGSDKEAILDIITSRSNRQRQEVCQSYKSLYGKDLIADLKYELTGKFERLIVGLMRPPAYCDAKEIKDAISGIGTDEKCLIEILASRTNEQMHQLVAAYKDAYERDLEADIIGDTSGHFQKMLVVL

SEQ ID NO: 99360 - protein, 288 aa, Homo sapiens
  MOD_RES (1)..(1): Any amino acid
XALLDAERLKREAQLRASLEVTQQQATQAEGQLLELRKQSSQIQNSACILASWVSGKFSSLLQALEIQHTTALRSIEVAKTQALAQARDEEQRLRVHLEAVARHGCRIRELLEQVDEQTFLQESQLLQPPGPLGPLTPLQWDEDQQLGDLKQLLSRLCGLLLEEGSHPGAPAKPVDLAPVDYRNLTFDPVSANRHFYLSRQDQQVKHCRQSRGPGGPGSFELWQVQCAQSFQAGHHYWEVRASDHSVTLGVSYPQLPRCRLGPHTDNIGRGPCSWGLCVQEDSLQAWH

SEQ ID NO: 99361 - protein, 95 aa, Homo sapiens
MPVYSAWPAEPTMAPFEPLASGILLLLWLIAPSRACTCVPPHPQTAFCNSDLVIRAKFVGTPEVNQTTLYQRYEIKMTKMYKGFQALGDAADIRF

SEQ ID NO: 99362 - protein, 144 aa, Homo sapiens
RPHWDPQEVTLQLFTDGITNKLIGCYVGNTMEDVVLVRIYGNKTELLVDRDEEVKSFRVLQAHGCAPQLYCTFNNGLCYEFIQGEALDPKHVCNPAIFRSEEQKRLSSKETVWKTFPNNCSTWMTTSLSFAYSLKAELLCRALQ

SEQ ID NO: 99363 - protein, 99 aa, Homo sapiens
MPLSVAEGKEVLLLVHNLPQHLFGYSWYKGERVDGNSLIVGYVIGTQQATPGAAYSGRETIYTNASLLIQNVTQNDIGFYTLQVIKSDLVNEEATGQFH

SEQ ID NO: 99364 - protein, 155 aa, Homo sapiens
MRRCNSGSGPPPSLLLLLLWLLAVPGANAAPRSALYSPSDPLTLLQADTVRGAVLGSRSAWAVEFFASWCGHCIAFAPTWKALAEDVKAWRPALYLAALDCAEETNSAVCRDFNIPGFPTVRFFKAFTKNGSGAVFPGWRRLMDSLREITKSTWL

SEQ ID NO: 99365 - protein, 120 aa, Homo sapiens
MYKDCIESTGDYFLLCDAEGPWGIILESLAILGIVVTILLLLAFLFLMRKIQDCSQWNVLPTQLLFLLSVLGLFGLAFAFIIELNQQTAPVRYFLFGVLFALCFSCLLAHASNLVKLVRG

SEQ ID NO: 99366 - protein, 607 aa, Homo sapiens
  MOD_RES (1)..(1): Any amino acid
XETLVSLRVHTVDDIQQIAAALAQCMGPSRELVCRSCLKQTLHKLEAMMLILQAETTAGTVTPTAIGDSILNITGDLIHLASSDVRAPQPSELGAESPSRMVASQAYNLTSALMRILMRSRVLNEEPLTLAGHYLSEEPEPYLAVYLHSEPRPNEHNCSASRRIRPESLQGADHRPYTFFISPGSRDPAGSYHLNLSSHFRWSALQVSVGLYTSLCQYFSEEDMVWRTEGLLPLEETSPRQAVCLTRHLTAFGASLFVPPSHVRFVFPEPTADVNYIVMLTCAVCLVTYMVMAAILHKLDQLDASRGRAIPFCGQRGRFKYEILVKTGWGRGSGTTAHVGIMLYGVDSRSGHRHLDGDRAFHRNSLDIFRIATPHSLGSVWKIRVWHDNKGLSPAWFLQHVIVRDLQTARSAFFLVNDWLSVETEANGGLVEKEVLAASDAALLRFRRLLVAELQRGFFDKHIWLSIWDRPPRSRFTRIQRATCCVLLICLFLGANAVWYGAVGDSAYSTGHVSRLSPLSVDTVAVGLVSSVVVYPVYLAILFLFRMSRSKVAGSPSPTPAGQQVLDIDSCLDSSVLDSSFLTFSGLHAEQAFVGQMKSDLFLDDSK

SEQ ID NO: 99367 - protein, 92 aa, Homo sapiens
KSEMGPWMDSYSGPYGDMRRCCEQRGIPRRSSVPSSCLCKCLPEAAGGWLCTGLCTGNQGNECRVLLTLPVTFSHDTLASQFGDCQGPCFAH

SEQ ID NO: 99368 - protein, 90 aa, Homo sapiens
MGKGIPLNDQDRIPWLCNLHDILLRDVASGQRVVLACSALKKTYRDILTQGKDGVALKCEESGKEAKQAEMQLLVVHLSGSFEVISGRLL

SEQ ID NO: 99369 - protein, 210 aa, Homo sapiens
  MOD_RES (1)..(1): Any amino acid
XLQTTQGIAMALSLEEFVHSLDLRTLPRVLEIQAGIYLEGSIYEMFGNECCFSTGEVIKITGLKVKKIIAEICEQIEGCESLQPFELPMNFPVRKDIIRILPSLDVEVKDITDSYDANWFLQLLSTEDLFEMTSKEFPIVTEVIEAPEGNHLPQSILQPGKTIVIHKKYQASRILASEIRSNFPKRHFLIPTSYKGKFKRRPREFPTAYD

SEQ ID NO: 99370 - protein, 103 aa, Homo sapiens
MEATRRRQHLGATGGPGAQLGASFLQASWYSLSSGFHSTSPVLGTTSTWPTTSSRPFSCSRSTPLSCSTIMMSTWVTACGTSPSSSSSSCTSAAALLPLKLRA

SEQ ID NO: 99371 - protein, 50 aa, Homo sapiens
MEEQDEKPPEPPKVCAQSLALSSRLECSDTILAHCRLKLLGSSHPPASAA

SEQ ID NO: 99372 - protein, 117 aa, Homo sapiens
MATPTQTPTKAPEEPDPFYYDYNTVQTVGMTLATILFLLGILIVISKCDPFLGCLSLRFLCWLSSISYPLCPVFLFCLSLPTGKKVKCRKADSRSESPTCKSCKSELPSSAPGGGGV

SEQ ID NO: 99373 - protein, 136 aa, Homo sapiens
MCGPAMFPAGPPWPRVRVVQVLWALLAVLLASWRLWAIKDFQECTWQVVLNEFKRVGESGVSDSFFEQEPVDTVSSLFHMLVDSPIDPSEKYLGFPYYLKINYSCEEKSPVNFYRWKIEQLQIQMEAAPFRSKGSR

SEQ ID NO: 99374 - protein, 736 aa, Homo sapiens [sequence omitted]

SEQ ID NO: 99375 - protein, 72 aa, Homo sapiens
MSNRNNNKLPSNLPQLQNLIKRDPPAYIEEFLQQYNHYKSNVEIFKLQPNKPSKELAELVMFMAQNILNVCI

SEQ ID NO: 99376 - protein, 228 aa, Homo sapiens
MFANLKYVSLGILVFQTTSLVLTMRYSRTLKEEGPRYLSSTAVVVAELLKIMACILLVYKDSKCSLRALNRVLHDEILNKPMETLKLAIPSGIYTLQNNLLYVALSNLDAATYQWPSDSQLDSKELSAGSQFVGLMAVLTACFSSGFAGVYFEKILKETKQSVWIRNIQLGFFGSIFGLMGVYIYDGELVSKNGFFQGYNRLTWIVVVLQCLFPWSHPCNNSYFFVWL

SEQ ID NO: 99377 - protein, 219 aa, Homo sapiens
MKGTDSGSCCRRRCDFGCCCRASRRAHYTPYRSGDATRTPQSPRQTPSRERRRPEPAGSWAAAAEEEEAAAAATPWMRDYFAEDDGEMVPRTSHTAAFLSDTKDRGPPVQSQIWRSGEKVPFVQTYSLRAFEKPPQVQTQALRDFEKHLNDLKKENFSLKLRIYFLEERMQQKYEASREDIYKRQLPTQTLGPADFGGLQLNLHLLLEWSSLCKRGWWK

SEQ ID NO: 99378 - protein, 147 aa, Homo sapiens
MKFGCLSFRQPYAGFVLNGIKTVETRWRPLLSSQRNCTIAVHIAHRDWEGDACRELLVERLGMTPAQIQALLRKGEKFGRGVIAGLVDIGETLQCPEDLTPDEVVELENQAALTNLKQKYLTVISNPRWLLEPIPRKGGKDVFQVDI

SEQ ID NO: 99379 - protein, 88 aa, Homo sapiens
MAVSTVFSTSSLMLALSRHSLLSPLLSVTSFRRFYRGDSPTDSQKDMIEIPLPPWQERTDESIETKRARLLYESRKRGMLENCILLRS

SEQ ID NO: 99380 - protein, 124 aa, Homo sapiens
MESCYIAQAGLELLGSSSSPTLTSQSAEITEDASNGGVSEQHPWPSGFERELKPETISSPGYHILRATGEENMAVSLDDDVPLILTLDEGGSAPLAPSNGLGQEELPSKNGGSYAIHDSQAPSL

SEQ ID NO: 99381 - protein, 152 aa, Homo sapiens
MWVRTTLTIERWTKEKTEPKARSWDESRCRDVNRLPSWERGHLLAGVASSTDVSTFSEGDCKEPDKCCWRHKQCTGHIIYPFASDCVRHSLHLHSVNHCNCNSSFELVLPAQSQLCTPCSALREMGRRSVGLRQAQRKPTVPQASGSGSLGE

SEQ ID NO: 99382 - protein, 155 aa, Homo sapiens
MAKPSHSSYVLQQLNNQREWGFLCDCCIAIDDIYFQAHKAVLAACSSYFRMFFMNHQHSTAQLNLSNMKISAECFDLILQFMYLGKIMTAPSSFEQFKVAMNYLQLYNVPDCLEDIQDADCSSSKCSSSASSKQNSKMIFGVRMYEDTVARNGNE

SEQ ID NO: 99383 - protein, 47 aa, Homo sapiens
MTFRTEMGLYYSYFKTIIEAPSFLEGLWMIMNDRLTEYPLIINAIKR

SEQ ID NO: 99384 - protein, 245 aa, Homo sapiens
MELLCHEVDPVRRAVRDRNLLRDDRVLQNLLTIEERYLPQCSYFKCVQKDIQPYMRRMVATWMLEVCEEQKCEEEVFPLAMNYLDRFLAGVPTPKSHLQLLGAVCMFLASKLKETSPLTAEKLCIYTDNSIKPQELLEWELVVLGKLKWNLAAVTPHDFIEHILRKLPQQREKLSLIRKHAQTFIALCATDFKFAMYPPSMIATGSVGAAICGLQQDEEVSSLTCDALTELLAKITNTDVWRNKI

SEQ ID NO: 99385 - protein, 182 aa, Homo sapiens
DECESGAHQCSEAQTCVNFHGGYRCVDTNRCVEPYIQVSENRCLCPASNPLCREQPSSIVHRYMTITSERSVPADVFQIQATSVYPGAYNAFQIRAGNSQGDFYIRGPTPSEEQEGATLPAATLAEEPVVRGRMRKAQGPPLTGAGSSAPRASVTPRGEEVTRRADSRPRPRDLDLAGLQGS

SEQ ID NO: 99386 - protein, 59 aa, Homo sapiens
  MOD_RES (1)..(1): Any amino acid
XKTLFELAAESDVSTAIDLFRQAGLGNHLSGSERLTLLAPLNSVFKGAHLSGPNHHPFL

SEQ ID NO: 99387 - protein, 175 aa, Homo sapiens [sequence omitted]

SEQ ID NO: 99388 - protein, 1370 aa, Homo sapiens
MVSEGSAAGRDFAGMEEIYNAVRREETENTVGSLLHFLTKLPASETAHGRISVGPCLKQCVRDTVCEYRATLQRTSISQYITGSLLEATTSLGARSGLLSTFGGSTGRMMLKERQPGPSVANSNALPSSSAGISKELIDLQPLIQFPEEVASILMEQEQTIYRRVLPVDYLCFLTRDLGTPECQSSLPCLKASISASILTTQNGEHNALEDLVMRFNEVSSWVTWLILTAGSMEEKREVFSYLVHVAKCCWNMGNYNAVMEFLAGLRSRKVLKMWQFMDQSDIETMRSLKDAMAQHESSCEYRKVVTRALHIPGCKVVPFCGVFLKELCEVLDGASGLMKLCPRYNSQEETLEFVADYSGQDNFLQRVGQNGLKNSEKESTVNSIFQVIRSCNRSLETDEEDSPSEGNSSRKSSLKDKSRWQFIIGDLLDSDNDIFEQSKEYDSHGSEDSQKAFDHGTELIPWYVLSIQADVHQFLLQGATVIHYDQDTHLSARCFLQLQPDNSTLTWVKPTTASPASSKAKLGVLNNTAEPGKFPLLGNAGLSSLTEGVLDLFAVKAVYMGHPGIDIHTVCVQNKLGSMFLSETGVTLLYGLQTTDNRLLHFVAPKHTAKMLFSGLLELTRAVRKMRKFPDQRQQWLRKQYVSLYQEDGRYEGPTLAHAVELFGGRRWSARNPSPGTSAKNAEKPNMQRNNTLGISTTKKKKKILMRGESGEVTDDEMATRKAKMHKECRSRSGSDPQDINEQEESEVNAIANPPNPLPSRRAHSLTTAGSPNLAAGTSSPIRPVSSPVLSSSNKSPSSAWSSSSWHGRIKGGMKGFQSFMVSDSNMSFVEFVELFKSFSVRSRKDLKDLFDVYAVPCNRSGSESAPLYTNLTIDENTSDLQPDLDLLTRNVSDLGLFIKSKQQLSDNQRQISDAIAAASIVTNGTGIESTSLGIFGVGILQLNDFLVNCQGEHCTYDEILSIIQKFEPSISMCHQGLMSFEGFARFLMDKENFASKNDESQENIKELQLPLSYYYIESSHNTYLTGHQLKGESSVELYSQVLLQGCRSVELDCWDGDDGMPIIYHGHTLTTKIPFKEVVEAIDRSAFINSDLPIIISIENHCSLPQQRKMAEIFKTVFGEKLVTKFLFETDFSDDPMLPSPDQLRKKVLLKNKKLKAHQTPVDILKQKAHQLASMQVQAYNGGNANPRPANNEEEEDEEDEYDYDYESLSDDNILEDRPENKSCNDKLQFEYNEEIPKRIKKADNSACNKGKVYDMELGEEFYLDQNKKESRQIAPELSDLVIYCQAVKFPGLSTLNASGSSRGKERKSRKSIFGNNPGRMSPGETASFNKTSGKSSCEGIRQTWEESSSPLNPTTSLSAIIRTPKCY

SEQ ID NO: 99389 - protein, 82 aa, Homo sapiens
MEKRLQEAQLYKEEGNQRYREGKYRDAVSRYHRALLQLRGLDPSLPSPLPNLGPQGPALTPEQENILHTTQTDCYNNLAVVK

SEQ ID NO: 99390 - protein, 205 aa, Homo sapiens
EGQRNYLPNFIQSVLSSIDLRDRQGCTMVVGSDGRYFSRTAIEIVVQMAAANGIGRLIIGQNGILSTPAVSCIIRKIKAAGGIILTASHCPGGPGGEFGVKFNVANGVEIVDPVDIYLNLLRTIFDFHAIKGLLTGPSQLKIRIDAMHGVMGPYVRKVLCDELGAPANSAINCVPLEDFGGQHPDPNLTYATTLLEAMKGGEYGF

SEQ ID NO: 99391 - protein, 210 aa, Homo sapiens
MPSSVTALGQARSSGPGMAPSACCCSPAALQRRLPILAWLPSYSLQWLKMDFVAGLSVGLTAIPQALAYAEVAGLPPQYGLYSAFMGCFVYFFLGTSRDVTLGPTAIMSLLVSFYTFHEPAYAVLLAFLSGCIQLAMGVLRLGFLLDFISYPVIKGFTSAAAVTIGFGQIKNLLGLQNIPRPFFLQVYHTFLRIAETRVGDAVLGLVCML

SEQ ID NO: 99392 - protein, 195 aa, Homo sapiens
MAGPAEEAGAHCPESLWPLPPQVSPRVTYTRVSPGQAEDVTFLYHPCAHPWLKLQLALLAYACMANPSLTPDFSLTQDRPLVLTAWGLALEMAWVEPAWAAHWLMRRRRRKQRKKKAWIYCESLSGPAPSEPTPGRGRLCRRGCVQALALAFALRSWRPPGTEVTSQGPRQPSSSGAKRRRLRAALGPQPTRSAL

SEQ ID NO: 99393 - protein, 182 aa, Homo sapiens
MLHDFTQQVQVIEMLQKVTLDIKSLSAEKYDVSSQVISQLKQKLENLQNSQLPESFRVPYDPGLKAGALAIEKCKVMASKKKPLWLEFKCADPTALSNETIGIIFKHGDDLRQDMLILQILRIMESIWETESLDLCLLPYGCISTGDKIGMIEIVKDATTIAKIQQSTVGNTGAFKDEVLNH

SEQ ID NO: 99394 - protein, 46 aa, Homo sapiens
MSFDPNLLHNNGHNGYPNGTSAALRETGVIEKLLTSYGFIQCSERQ

SEQ ID NO: 99395 - protein, 418 aa, Homo sapiens
LSGSRQDLIPSYSLGSNKGRWESQQDVSQTTVSRGIAPAPALSVSPQNNHSPDPGLSNLAASYLNPVKSFVPQMPKLLKSLFPVRDEKRGKRPSPLAHQAQPEMGPDVLVQTMGAPALKICDKPAKVPSPPPVIAVTAVTPAPEAQDGPPSPLSEASSGYFSHSVSTATLSDALGPGLDAAAPPGSMPTAPEAEPEAPISHPPPPTAVPAEEPPGPQQLVSPGRERPDLEAPAPGSPFRVRRVRASELRSFSRMLAGDPGCSPGAEGNAPAPGAGGQALASDSEEADEVPEWLREGEFVTVGAHKTGVVRYVGPADFQEGTWVGVELDLPSGKNDGSIGGKQYFRCNPGYGLLVRPSRVRRATGPVRRRSTGLRLGAPEARRSATLSGSATNLASLTAALAKADRSHKNPENRKSWAS

SEQ ID NO: 99396 - protein, 203 aa, Homo sapiens
  MOD_RES (1)..(1): Any amino acid
XVNSCVKSDEHVLEELETEGERQLKSLLQHQLDTSVSIEECMSKKESFAPGTMYKPFGKEAAGTMTLSQFQTLHEKDQETASLRELGLNETEILIWKSHVSGEKKTKLRATPEAIQNRLQDIEERISERQRILCLPQRFAKSKQLTRREMEIEKSLFQGADRHSFLKALYYQAYHKKTSADKYMTSMKRKIKLGTKGIIPEEP

SEQ ID NO: 99397 - protein, 609 aa, Homo sapiens
MMAQFPTAMNGGPNMWAITSEERTKHDRQFDNLKPSGGYITGDQARNFFLQSGLPAPVLAEIWALSDLNKDGKMDQQEFSIAMKLIKLKLQGQQLPVVLPPIMKQPPMFSPLISARFGMGSMPNLSIPQPLPPAAPITSLSSATSGTNLPPLMMPTPLVPSVSTSSLPNGTASLIQPLPIPYSSSTLPHGSSYSLMMGGFGGASIQKAQSLIDLGSSRSWSSGSSAHSPATHRAPLSSPVPNSSTSSTASLSGNSPKTGTSEWAVPQPTRLKYRQKFNTLDKSMSGYLSGFQARNALLQSNLSQTQLATIWTLADVDGDGQLKAEEFILAMHLTDMAKAGQPLPLTLPPELVPPSFRGGKQIDSINGTLPSYQKMQEEEPQKKLPVTFEDKRKANYERGNMELEKRRQALMEQQQREAERKAQKEKEEWERKQRELQEQEWKKQLELEKRLEKQRELERQREEERRKDIERREAAKQELERQRRLEWERIRRQELLNQKNREQEEIVRLNSKKKNLHLELEALNGKHQQISGRLQDVRLKKQTQKTELEVLDKQCDLEIMEIKQLQQELQEYQNKLIYLVPEKQLLNERIKNMQFSNTPDSGVSLLHKK

SEQ ID NO: 99398 - protein, 92 aa, Homo sapiens
MWQLWASLCCLLVLANARSRPSFHPLSDELVNYVNKRNTTWQAGHNFYNVDMSYLKRLCGTFLGGPKPPQRVMFTEDLKLPASFDAREQWPQ

SEQ ID NO: 99399 - protein, 73 aa, Homo sapiens
MAVSAGSARTSPSSGFLMVLDIPQERGLSSLDRKYLDGLDVCRFPLLDALRPLPLDWMYLVYTIMFLGKLGLW

SEQ ID NO: 99400 - protein, 71 aa, Homo sapiens
MEAAVAPGRDAPAPAASQPSGCGKHNSPERKVYMDYNATTPLEPEVIQAMTKAMWEAWGNPSSPYSAAYSM

SEQ ID NO: 99401 - protein, 1635 aa, Homo sapiens
MTSAQCPALACVMSPLRFWGPWPLLMWQLLWLLVKEAQPLEWVKDPLQLTSNPLGPPEPWSSHSSHFPRESPHAPTLPADPWDFDHLGPSASSEMPAPPQESTENLVPFLDTWDSAGELPLEPEQFLASQQDLKDKLSPQERLPVSPKKLKKDPAQRWSLAEIIGIIRQLSTPQSQKQTLQNEYSSTDTPYPGSLPPELRVKSDEPPGPSEQVGPSQFHLEPETQNPETLEDIQSSSLQQEAPAQLPQLLEEEPSSMQQEAPALPPESSMESLTLPNHEVSVQPPGEDQAYYHLPNITVKPADVEVTITSEPTNETESSQAQQETPIQFPEEVEPSATQQEAPIEPPVPPMEHELSISEQQQPVQPSESPREVESSPTQQETPGQPPEHHEVTVSPPGHHQTHHLASPSVSVKPPDVQLTIAAEPSAEVGTSLVHQEATTRLSGSGNDVEPPAIQHGGPPLLPESSEEAGPLAVQQETSFQSPEPINNENPSPTQQEAAAEHPQTAEEGESSLTHQEAPAQTPEFPNVVVAQPPEHSHLTQATVQPLDLGFTITPESKTEVELSPTMKETPTQPPKKVVPQLRVYQGVTNPTPGQDQAQHPVSPSVTVQLLDLGLTITPEPTTEVGHSTPPKRTIVSPKHPEVTLPHPDQVQTQHSHLTRATVQPLDLGFTITPKSMTEVEPSTALMTTAPPPGHPEVTLPPSDKGQAQHSHLTQATVQPLDLELTITTKPTTEVKPSPTTEETSTQPPDLGLAIIPEPTTETGHSTALEKTTAPRPDRVQTLHRSLTEVTGPPTELEPAQDSLVQSESYTQNKALTAPEEHKASTSTNICELCTCGDEMLSCIDLNPEQRLRQVPVPEPNTHNGTFTILNFQGNYISYIDGNVWKAYSWTEKLILRENNLTELHKDSFEGLLSLQYLDLSCNKIQSIERHTFEPLPFLKFINLSCNVITELSFGTFQAWHGMQFLHKLILNHNPLTTVEDPYLFKLPALKYLDMGTTLVPLTTLKNILMMTVELEKLILPSHMACCLCQFKNSIEAVCKTVKLHCNSACLTNTIHCPEEASVGNPEGAFMKVLQARKNYTSTELIVEPEEPSDSSGINLSGFGSEQLDTNDESDFISTLRYILPYFSAVNLDVKSLLLPLIKLPTTGNSLAKIQTVGQNRQRVKRVLMGPRSIQKRHFKEVGRQSIRREQGAQASVENAAEEKRLGSPAPREVEQPHTQQGPEKLAGNAVYTKPSFTQEHKAAVSVLKPFSKGAPSTSSPAKALPQVRDRWKDLTHAISILESAKARVTNTKTSKPIVHARKKYRFHKTRSHVTHRTPKVKKSPKVRKKSYLSRLMLANRLPFSAAKSLINSPSQGAFSSLGDLSPQENPFLEVSAPSEHFIEKNNTKHTTARNAFEENDFMENTNMPEGTISENTNYNHPPEADSAGTAFNLGPTVKQTETKWEYNNVGTDPSPEPKSFNYPLLSSPGDQFEIQLTQQLQSLIPNNNVRRLIAHVIRTLKMDCSGAHVQVTCAKLISRTGHLMKLLSGQQEVKASKIEWDTDQWKIENYINESTEAQSEQKEKSLELKKEVPGYGYTDKLILALIVTGILTILIILFCLIVICCHRRSLQEDEEGFSRDSEAPTEEEESEALP

SEQ ID NO: 99402 - protein, 48 aa, Homo sapiens
MGCGNSTATSAGAGQGPAGAAKDVPFSSTTWVRLCHCLMDQLYSNSRR

SEQ ID NO: 99403 - protein, 123 aa, Homo sapiens
MEPQEERETQVAAWLKKIFGDHPIPQYEVNPRTTEILHHLSERNRVRDRDVYLVIEDLKQKASEYESEGATFSQRHGCFSVSSVLSSTIRETGKIKATDYTFEEKIGVLFRLNAESVSCSSEN

SEQ ID NO: 99404 - protein, 464 aa, Homo sapiens
  MOD_RES (1)..(1): Any amino acid
XYPHSLNFSSRQGSVRNLAVRVQYMTGEDPSQALPVIFGKSSCSEFTREAFTPVVYHNKSPEFYEEFKLHLPACVTENHHLLFTFYHVSCQPRPGTALETPVGFTWIPLLQHGRLRTGPFCLPVSVDQPPPSYSVLTPDVALPGMRWVDGHKGVFSVELTAVSSVHPQDPYLDKFFTLVHVLEEGAFPFRLKDTVLSEGNVEQELRASLAALRLASPEPLVAFSHHVLDKLVRLVIRPPIISGQIVNLGRGAFEAMAHVVSLVHRSLEAAQDARGHCPQLAAYVHYAFRLPGTEPSLPDGAPPVTVQAATLARGSGRPASLYLARSKSISSSNPDLAVAPGSVDDEVSRILASKAIDCNSSRASSYLEGSSSAPPATQLRPTVQKLLHEELALQWVVSSSAVREAILQHAWFFFQLMVKSMALHLLLGQRLDTPRKLRFPGRFLDDITALVGSVGLEVITRVHK

SEQ ID NO: 99405 - protein, 142 aa, Homo sapiens
MRSLLLLSAFCLLEAALAAEVKKPAAAAAPGTAEKLSPKATTASQAKAVLSAEQLRDEEVHAGLGELLRSLSNSTARNVTWKLGSRLYGPSSVSFADDFVRSSKQHYNCEHSKINFRDKRSALQSINEWAAQTTDGKLPEVT

SEQ ID NO: 99406 - protein, 260 aa, Homo sapiens
MAEAVLRVARRQLSQRGGSGAPILLRQMFEPVSCTFTYLLGDRESREAVLIDPVLETAPRDAQLIKELGLRLLYAVNTHCHADHITGSGLLRSLLPGCQSVISRLSGAQADLHIEDGDSIRFGRFALETRASPGHTPGCVTFVLNDHSMAFTGDALLIRGCGRTDFQQGCAKTLYHSVHEKIFTLPGDCLIYPAHDYHGFTVSTVEEERTLNPRLTLSCEEFVKIMGNLNLPKPQQIGEQLGTWTSGSERGGAGVLDSWV

SEQ ID NO: 99407 - protein, 50 aa, Homo sapiens
FIALLLRFDISLKKNTHTYFYTSFAAYIFGLGLTIFIMHIFKHAQVLGLH

SEQ ID NO: 99408 - protein, 152 aa, Homo sapiens
MQSFMMPFYLMKDCEIKQPVFGANYIKGTVKAEAGGGWEGSASYKLTFTAGGAIEFGQRMLQVASQASRGEVPSGAYGYSYMPSGAYVYPPPVANGMYPCPPGYPYPPPPPEFYPGPPMMDGAMGYVQPPPPPYPGPMEPPVSGPDVPSTPA

SEQ ID NO: 99409 - protein, 118 aa, Homo sapiens
MLLFALLLAMELPLVAASATMRAQWTYSLRCHDCAVINDFNCPNIRVCPYHIRRCMTISIQLSSGDRAAVCPGPHPTFFQPGAWIPTQVTDSKHQPLPAHLTRRHPLHGPGNILPSAI

SEQ ID NO: 99410 - protein, 225 aa, Homo sapiens
MAGSGAKRSRDGELETSLNTQGCTTEGDLLFAQKCKELQGFIPPLTDLLNGLKMGRFERGLSSFQQSVAMDRIQRIVGVLQKPQMGERYLGTLLQVEGMLKTWFPQIAAQKSSLGGGKHQLTKHFPSHHSDSAASSPASPMEKMDQTQLGHLALKPKQPWHLTQWPAMNLTWIHTTPICNPPLSSPGTISFSHGPLGTGTGIGVILFLQHGVQPFTHSAPTTPVP

SEQ ID NO: 99411 - protein, 737 aa, Homo sapiens
MERQVLLSEPEEAAALYRGLSRQPALSAACLGPEVTTQYGGQYRTVHTEWTQRDLERMENIRFCRQYLVFHDGDSVVFAGPAGNSVETRGELLSRESPSGTMKAVLRKAGGTGPGEEKQFLEVWEKNRKLKSFNLSALEKHGPVYEDDCFGCLSWSHSETHLLYVAEKKRPKAESFFQTKALDVSASDDEIARLKKPDQAIKGDQFVFYEDWGENMVSKSIPVLCVLDVESGNISVLEGVPENVSPGQAFWAPGDAGVVFVGWWHEPFRLGIRFCTNRRSALYYVDLIGGKCELLSDDSLAVSSPRLSPDQCRIVYLQYPSLIPHHQCSQLCLYDWYTKVTSVVVDVVPRQLGENFSGIYCSLLPLGCWSADSQRVVFDSAQRSRQDLFAVDTQVGTVTSLTAGGSGGSWKLLTIDQDLMVAQFSTPSLPPTLKVGFLPSAGKEQSVLWVSLEEAEPIPDIHWGIRVLQPPPEQENVQYAGLDFEAILLQPGSPPDKTQVPMVVMPHGGPHSSFVTAWMLFPAMLCKMGFAVLLVNYRGSTGFGQDSILSLPGNVGHQDVKDVQFAVEQVLQEEHFDASHVALMGGSHGGFISCHLIGQYPETYRACVARNPVINIASMLGSTDIPDCSVSCRCVVEAGFPFSSDCLPDLSVWAEMLDKSPIRYIPQVKTPLLLMLGQEDRRVPFKQGMEYYRALKTRNVPVRLLLYPKSTHALSEVEVESDSFMNAVLWLRTHLGS

SEQ ID NO: 99412 - protein, 88 aa, Homo sapiens
MAEYDLTTRIAHFLDRHLVFPLLEFLSVKEIYNEKELLQGKLDLLSDTNMVDFAMDVYKNLYSDDIPHGMVGCSLTTWRTSMVLGRNI

SEQ ID NO: 99413 - protein, 93 aa, Homo sapiens
  MOD_RES (1)..(1): Any amino acid
XEVTAPVASDSSYRNECPRAEKEDTQMLPNPSSKAIADGRGAPAAAGISKTEKKVKLEDKSSTAFGIRSWDFSALLMKIPSYSPISLSGLPES

SEQ ID NO: 99414 - protein, 190 aa, Homo sapiens
MEISRLAQSKRNIISLNMDLERDTQRIDEANQKLLLKIQEREDKIQRLESEIIQTRGLVEDEEWEKENRTTMERERALQELEEETARLERKNKTLVHSITELQQKLTRKSQKITNCEQSSPDGALEETKVKLQQLEASYACQEKELLKVMKEYAFVTQLCEDQALYIKKYQETLKKIEEELEALFLEREV

SEQ ID NO: 99415 - protein, 94 aa, Homo sapiens
MLLNELLCISKVPPGTKHVDMDLATLPPTTAMAVLLYNRWAIRTIVQSSFPVKQAKPGPPQLSVMNQMQQEKELTENILKVLKEQAADSILVLE

SEQ ID NO: 99416 - protein, 171 aa, Homo sapiens
MADLANEEERSSGFRLKPPTLIHGQAPSAGLPSQKPKEQQRSVLRPAVLQAPQPKALSQTVPSSGTNGVSLPADCTGAVPAASPDTAAWRSPSEAADEVCALEEKEPQKNESSNASEEEACEKKDPATQQAFVFGQNLRDRVKLINESVDEADMENAGHPSADTPTATNYF

SEQ ID NO: 99417 - protein, 141 aa, Homo sapiens
MSREMQDVDLAEVKPLVECNSKLDPTKTTLLKMADCGGLPQISQPAKLAEAFKYFVQGMGYMPSASMTRLMRSRTASGSSVTSLDGTRSRSHTSEGTRSRSHTSEGTRSRSHTSEGAHLDITPNSGAAGNSAGPKSMEVSC

SEQ ID NO: 99418 - protein, 42 aa, Homo sapiens
MAGAGERKGKKDDNGIGTAIDFVLSNARLVLGVGGAAMLGIA

SEQ ID NO: 99419 - protein, 50 aa, Homo sapiens
MVGRVQSKMHGKRTCLPSCIPKDLDCMQHSGGWAARTRMETLEKSDRRWH

SEQ ID NO: 99420 - protein, 463 aa, Homo sapiens
MFYFRGCGRWVAVSFTKQQFPLARLSSDSAAPRTPHFDVIVIGGGHAGTEAATAAARCGSRTLLLTHRVDTIGQMSCNPSFGGIGKGHLMREVDALDGLCSRICDQSGVHYKVLNRRKGPAVWGLRAQIDRKLYKQNMQKEILNTPLLTVQEGAVEDLILTEPEPEHTGKCRVSGVVLVDGSTVYAESVILTTGTFLRGMIVIGLETHPAGRLGDQPSIGLAQTLEKLGFVVGRLKTGTPPRIAKESINFSILNKHIPDNPSIPFSFTNETVWIKPEDQLPCYLTHTNPRVDEIVLKNLHLNSHVKETTRGPRYCPSIESKVLRFPNRLHQVWLEPEGMDSDLIYPQGLSMTLPAELQEKMITCIRGLEKAKVIQPDGVLLLLPRMECNGAISAHHNLPLPGYGVQYDYLDPRQITPSLETHLVQRLFFAGQINGTTGYEEAAAQGIKTLAVCPNNDMKELVG

SEQ ID NO: 99421 - protein, 415 aa, Homo sapiens
MNVTSIALRAETWLLAAWHVKVPPMWLEACINWIQEENNNVNLSQAQMNKQVFEQWLLTDLRDLEHPLLPDGILEIPKGELNGFYALQINSLVDVSQPAYSQIQKLRGKNTTNDLVTAEAQVTPKPWEAKPSRMLMLQLTDGIVQIQGMEYQPIPILHSDLPPGTKILIYGNISFRLGVLLLKPENVKVLGGEVDALLEEYAQEKVLARLIGEPDLVVSVIPNNSNENIPRVTDVLDPALGPSDEELLASLDENDELTANNDTSSERCFTTGSSSNTIPTRQSSFEPEFVISPRPKEEPSNLSIHVMDGELDDFSLEEALLLEETVQKEQMETKELQPLTFNRNADRSIERFSHNPNTTNNFSLTCKNGNNNWSEKNVSEQMTNEDKSFGCPSVRDQNRSIFSVHCNVPLAHDFT

SEQ ID NO: 99422 - protein, 160 aa, Homo sapiens
MPESKVGDTCVWDSKVENQQKKPVENRMKEDKSSIREAISKAKSTANIKTEQEGEASEKSLHLSPQHITHQTMPIGQRGSEQGKRVENINGTSYPSLQQKTNAVKKLHKCDECGKSFKYNSRLVQHKIMHTGEKRYECDDCGGTFRSSSSLRVHKRIHTG

SEQ ID NO: 99423 - protein, 189 aa, Homo sapiens
MNRLRNAKIYVERAVKQKKIFTIQGCYPVIRCLLRRRGWVEKKMVHRSGPTLLPPQKDLDSSAMGDSDTTEDEDEDEDEEFQPSQLFDFDDLLKFDDLDGTHALMSRMVQNEIPYFIWTTRRDVLDCRFLSKDQMINHYARAGSFTTKVGLCLNLRNLPWFDEVDANSFFPRCYCLGAEDDKKAFIGKE

SEQ ID NO: 99424 - protein, 136 aa, Homo sapiens
  MOD_RES (1)..(1): Any amino acid
XKLGSIAIQGAIEKAGIPKEEVKEAYMGNVLQGGEGQAPTRQAVLGAGLPISTPCTTINKVCASGMKAIMMASQSLMCGHQDVMVAGGMESMSNVPYVMNRGSTPYGGVKLEDLIVKDGLTDVYNKIHMVNVIFSG

SEQ ID NO: 99425 - protein, 151 aa, Homo sapiens
MEALGFLKLEVNGPMVTVALSVALLALLKWYSTSAFSRLEKLGLRHPKPSPFIGNLTFFRQGFWESQMELRKLYGPLCGYYLGRRMFIVISEPDMIKQVLVENFSNFTNRMPQSIMPNSRHHVASRGMWPGGRRLACYLHPFRMAEGIAEV

SEQ ID NO: 99426 - protein, 436 aa, Homo sapiens
MYHPRELYPSLGAGYRLGPAQPGADSSFPPALAEGYRYPELDTPKLDCFLSGMEAAPRTLAAHPPLPLLPPAMGTEPAPSAPEALHSLPGVSLSLENRELWKEFSSVGTEMIITKAGRRMFPACRVSVTGLDPEARYLFLLDVIPVDGARYRWQGRRWEPSGKAEPRLPDRVYIHPDSPATGAHWMRQPVSFHRVKLTNSTLDPHGHLILHSMHKYQPRIHLVRAAQLCSQHWGGMASFRFPETTFISVTAYQNPQVSDPAGGGGPLPRPSSSSPPLFPRERDARVKRKLRGPEPAATEAYGSGDTPGGPCDSTLGGDIRESDPEQAPAPGEATAAPAPLCGGPSAEAYLLHPAAFHGAPSHLPTRSPSFPEAPDSGRSAPYSAAFLELPHGSGGSGYPAAPPAVPFAPHFLQGGPFPLPYTAPGGYLDVGSKPMY

SEQ ID NO: 99427 - protein, 100 aa, Homo sapiens
MLPLLLGLLGPAACWALGPTPGPGSSELRSAFSAARTTPLEGTSEMAVTFDKVYVNIGGDFDVATGQFRCRVPGAYFFSFTAGKAPHKSLSVMLVRNRDE

SEQ ID NO: 99428 - protein, 129 aa, Homo sapiens
  MOD_RES (1)..(1): Any amino acid
XSRWWRAAPRGDIQQRNREMEGTVRRGAWLCAPARCPTPRRRAPGTCGKGGRIAAPFPPRPFRPLPASFSGVPRPLPNRQPRPRRPRSPGAEAPRRRRRPRVPYSQEVCPPRHERCCHVPDRQRCPCLQ

SEQ ID NO: 99429 - protein, 111 aa, Homo sapiens
MEGSRPRAPSGHLAPSPPAFDGELDLQRYSNGPAVSAGSLGMGAVSWSESRAGERRFPCPVCGKRFRFNSILALHLRAHPGAQAFQCPHCGHRAAQRALLRSHLRTHQPER

SEQ ID NO: 99430 - protein, 133 aa, Homo sapiens
  MOD_RES (1)..(1): Any amino acid
XVKLFGKRLNVCVSKQHSVVPSQIFELEDGTSSYKDFAMSKNNRFTSAGQASKNIIQPPSCVLHYYNVPLCVTEETFTKLCNDHEVLTFIKYKVFDAKPSAKTLSGLLEWECKTDAVEALTALNHYQIRVPSK

SEQ ID NO: 99431 - protein, 363 aa, Homo sapiens
  MOD_RES (1)..(1): Any amino acid
XQVVTAIQFGGKTMPRTDSCPAGAVPQPNSKPEIQQEMSTSQPDCNVDSCSVSSGYGTFCISELNLYKSKDPKEFMEHIDVPKGQYVAPAVPAESLVDGVKNENFYIQTPEECHVSLKEDVSISPGEFEHNFLGENKVSEVYSGKTNSNAITSWAQKLKQNQPKRAHVEDGGSRSKQGNEQSKKTPIEKSDFAAATHPRAFYLSKPDETPNAWMSDSGTGLTYWKLEEKDMHHSLPETLEKTFISLSSTDVSPNQSNTSNEMKLPSLKDIYYKKQRENKQLPERNLTSASNPNHPPEVLTLDPTLHMKPKQQISGIQPHGLPNALDDRISFSPDSVLEPSMSSPSDIDSFSQASNVTSQLPGF

SEQ ID NO: 99432 - protein, 49 aa, Homo sapiens
MSDSAGGRAGLRRYPKLPVWVVEDHQEVLPFIYRAIGSKHLPASNRIKY

SEQ ID NO: 99433 - protein, 77 aa, Homo sapiens
MTVGFNSDISSVVRVNTTNCHKCLLSGTYIFAVLLVCVVFHSGAQEKNYTIREEIPENVLIGNLLKDLNLSLIPNKS

SEQ ID NO: 99434 - protein, 181 aa, Homo sapiens
MVDTEMPFWPTNFGISSVDLSVMEDHSHSFDIKPFTTVDFSSISTPHYEDIPFTRTDPVVADYKYDLKLQEYQSAIKVEPASPPYYSEKTQLYNKPHEEPSNSLMAIECRVCGDKASGFHYGVHACEGCKGFFRRTIRLKLIYDRCDLNCRIHKKSRNKCQYCRFQKCLAVGMSHNAIRYL

SEQ ID NO: 99435 - protein, 115 aa, Homo sapiens
EKVTLLVLSNFKTTENQAHSTLVETLYRYRSDLEIIFNAIDTDHSGLISVEEFRAMWKLFSSHYNVHIDDSQVNKLANIMDLNKDGSIDFNEFLKAFYVVHRYEDLMKPDVTNLG

SEQ ID NO: 99436 - protein, 19 aa, Homo sapiens
MFHWQATIMGPISNYMLDN

SEQ ID NO: 99437 - protein, 67 aa, Homo sapiens
MAAVAGKERRARGRPRPETLGAIPRREGGEAGLSRAFKPLAQAPLSCETSLRKLKFKGKNGDGVSPC

SEQ ID NO: 99438 - protein, 58 aa, Homo sapiens
MYRALYAFRSAEPNALAFAAGETFLVLERSSAHWWLAARARSGETGYVPPAYLRRLQV

SEQ ID NO: 99439 - protein, 78 aa, Homo sapiens
MPALPLDQLQITHKDPKTGKLRTSPALETSLHSSQVTTVTWMKPCLPSFRSSAISSSTVVCKGTGPIPHPRSLRRGAD

SEQ ID NO: 99440 - protein, 214 aa, Homo sapiens
MEFPDLGAHCSEPSCQRLDFLPLKCDACSGIFCADHVAYAQHHCGSAYQKDIQVPVCPLCNVPVPVARGEPPDRAVGEHIDRDCRSDPAQQKRKIFTNKCERAGCRQREMMKLTCERCSRNFCIKHRHPLDHDCSGEGHPTSRAGLAAISRAQAVASTSTVPSPSQTMPSCTSPSRATTRSPSWTAPPVIALQNGLVSWAEVGWTETNTQRVKS

SEQ ID NO: 99441 - protein, 145 aa, Homo sapiens
MGQGWATAGLPSLLFLLLCYGHPLLVPSQEASQQVTVTHGTSSQATTSSQTTTHQATAHQTSAQSPNLVTDEAEASKFVEEYDRTSQVVWNEYAEANWNYNTNITTETSKILGLYDTWGSSLLCPCLDMCCLTAGIQGGCRRTCK

SEQ ID NO: 99442 - protein, 552 aa, Homo sapiens
MAHALVTFRDVAIDFSQKEWECLDTTQRKLYRDVMLENYNNLVSLGYSGSKPDVITLLEQGKEPCVVARDVTGRQCPGLLSRHKTKKLSSEKDIHEISLSKESIIEKSKTLRLKGSIFRNEWQNKSEFEGQQGLKERSISQKKIVSKKMSTDRKRPSFTLNQRIHNSEKSCDSHLVQHGKIDSDVKHDCKECGSTFNNVYQLTLHQKIHTGEKSCKCEKCGKVFSHSYQLTLHQRFHTGEKPYECQECGKTFTLYPQLNRHQKIHTGKKPYMCKKCDKGFFSRLELTQHKRIHTGKKSYECKECGKVFQLIFYFKEHERIHTGKKPYECKECGKAFSVCGQLTRHQKIHTGVKPYECKECGKTFRLSFYLTEHRRTHAGKKPYECKECGKSFNVRGQLNRHKTIHTGIKPFACKVCEKAFSYSGDLRVHSRIHTGEKPYECKECGKAFMLRSVLTEHQRLHTGVKPYECKECGKTFRVRSQISLHKKIHTDVKPYKCVRCGKTFRFGFYLTEHQRIHTGEKPYKCKECGKAFIRRGNLKEHLKIHSGLKPYD

SEQ ID NO: 99443 - protein, 219 aa, Homo sapiens
MAADQRPKADTLALRQRLISHLFSGSGRLTRTHAEMSKEATEAENAFRNNPKFQRLVTPSASCFATTCGVERQVGHCHPLVVQAAHEQNQVLNTNSRYLHDNIVDYAQRLSETLPEQLCVFYFLNSGSEANDLALRLARHYTGHQDVVVLDHAYHGHLSSLIDISPYKFRNLDGQKEWVHVAPLPDTYRGPYREDHPNPAMAYANEVKRVVSSAQEKGR

SEQ ID NO: 99444 - protein, 52 aa, Homo sapiens
MPRWWYNVTDGSCQLFVYGGCDGNSNNYLTKEECLKKCATVTENATGDLATS

SEQ ID NO: 99445 - protein, 141 aa, Homo sapiens
MLGRFQPFSLVRSFRLGFEACCYPNQKCATQTIRPPDSRCLVQAVSQNFNFAKDVLDQWSQLEKDGLRGPYPALWKVSAKGEEDKWSFERMTQLSKKAASILSDTCALSHGDRLMIILPPTPEAYWICLACESPLCLGAPS

SEQ ID NO: 99446 - protein, 389 aa, Homo sapiens
MSKISEAVKRARAAFSSGRTRPLQFRIQQLEALQRLIQEQEQELVGALAADLHKNEWNAYYEEVVYVLEEIEYMIQKLPEWAADEPVEKTPQTQQDELYIHSEPLGVVLVIGTWNYPFNLTIQPMVGAIAAGNSVVLKPSELSENMASLLATIIPQYLDKDLYPVINGGVPETTELLKERFDHILYTGSTGVGKIIMTAAAKHLTPVTLELGGKSPCYVDKNCDLDVACRRIAWGKFMNSGQTCVAPDYILCDPSIQNQIVEKLKKSLKEIFGPVLPIVCVRSLEEAIQFINQREKPLALYMFSSNDKVIKKMIAETSSGGVAANDVIVHITLHSLPFGGVGNSGMGSYHGKKSFETFSHRRSCLVRPLMNDEGLKVRYPPSPAKMTQH

SEQ ID NO: 99447 - protein, 405 aa, Homo sapiens
MRTTKVYKLVIHKKGFGGSDDELVVNPKVFPHIKLGDIVEIAHPNDEYSPLLLQVKSLKEDLQKETISVDQTVTQVFRLRPYQDVYVNVVDPKVSTCAYITQKVEFAGIRAQAGELWVKNEKVMCGYISEDTRVVFRSTSAMVYIFIQMSCEMWDFDIYGDLYFEKAVNGFLADLFTKWKEKNCSHEVTVVLFSRTFYDAKSVDEFPEINRASIRQDHKGRFYEDFYKVVVQNERREEWTSLLVTIKKLFIQYPVLVRLEQAEGFPQGDNSTSAQGNYLEAINLSFNVFDKHYINRNFDRTGQMSVVITPGVGVFEVDRLLMILTKQRMIDNGIGVDLVCMGEQPLHAVPLFKLHNRSAPRDSRLGDDYNIPHWINHSPPLRKQKMAVIHLSGVQKNLRTPFPSK

SEQ ID NO: 99448 - protein, 119 aa, Homo sapiens
MTPQSLLQTTLFLLSLLFLVQGAHGRGHREDFRFCSQRNQTHRSSLHYKPTPDLRISIENSEEALTVHAPFPAAHPASRSFPDPRGLYHFCLYWNRHAGRLHLLYGKRDFLLSDKASSL

SEQ ID NO: 99449 - protein, 161 aa, Homo sapiens
MPQAFLLGSIHEPAGALMEPQPCPGSLAESFLEEELRLNAELSQLQFSEPVGIIYNPVEYAWEPHRNYVTRYCQGPKEVLFLGMNPGPFGMAQTGVPFGEVSMVRDWLGIVGPVLTPPQEHPKRPVLGLECPQSEEDIGQLFPLLPWCPREVKNFNWSMRH

SEQ ID NO: 99450 - protein, 118 aa, Homo sapiens
METNCRKLVSACVQLEKDKSQQGKNEDVGAEDPSKKKRQRRQRTHFTSQQLQELEATFQRNRYPDMSTREEIAVWTNLTEARVRVWFKNRRAKWRKRERNQQAELCKNGFGPQFNGLM

SEQ ID NO: 99451 - protein, 631 aa, Homo sapiens
MKLLHVFLLFLCFHLRFCKVTYTSQEDLVEKKCLAKKYTHLSCDKVFCQPWQRCIEGTCVCKLPYQCPKNGTAVCATNRRSFPTYCQQKSLECLHPGTKFLNNGTCTAEGKFSVSLKHGNTDSEGIVEVKLVDQDKTMFICKSSWSMREANVACLDLGFQQGADTQRRFKLSDLSINSTECLHVHCRGLETSLAECTFTKRRTMGYQDFADVVCYTQKADSPMDDFFQCVNGKYISQMKACDGINDCGDQSDELCCKACQGKGFHCKSGVCIPSQYQCNGEVDCITGEDEVGCAGFASVTQEETEILTADMDAERRRIKSLLPKLSCGVKNRMHIRRKRIVGGKRAQLGDLPWQVAIKDASGITCGGIYIGGCWILTAAHCLRASKTHRYQIWTTVVDWIHPDLKRIVIEYVDRIIFHENYNAGTYQNDIALIEMKKDGNKKDCELPRSIPACVPWSPYLFQPNDTCIVSGWGREKDNERVFSLQWGEVKLISNCSKFYGNRFYEKEMECAGSKPFPRYGYKPSPPNGCGSPLFGVHLNIGIPSLTKCCNQHDRCYETCGKSKNDCDEEFQYCLSKICRDVQKTLGLTQHVQACETTVELLFDSVIHLGCKPYLDSQRAACRCHYEEKTDL

SEQ ID NO: 99452 - protein, 230 aa, Homo sapiens
MMAAMATARVRMGPRCAQALWRMPWLPVFLSLAAAAAAAAAEQQVPLVLWSSDRDLWAPAADTHEGHITSDLQLSTYLDPALELGPRNVLLFLQDKLSIEDFTAYGGVFGNKQDSAFSNLENALDLAPSSLVLPAVDWYAVSTLTTYLQEKLGASPLHVDLATLRELKLNASLPALLLIRLPYTASSGLMAPREVLTDEVIGQVLSTLKSEDVPYTAALTAVRPSRVARD

SEQ ID NO: 99453 - protein, 366 aa, Homo sapiens
  MOD_RES (1)..(1): Any amino acid
XSKKDVTTKLKAMQEFGTMCTERDTETVKGVLPYWPRIFCKISLDHDRRVREATQQAFEKLILKVKKQLAPYLKSLMGYWLMAQCDTYTPAAFAAKDAFEAAFPPSKQPEAIAFCKDEITSVLQDHLIKETPDTLSDPQTVPEEEREAKFYRVVTCSLLALKRLLCLLPDNELDSLEEKFKSLLSQNKFWKYGKHSVPQIRSAYFELVSALCQRIPQLMKEEASKVSPSVLLSIDDSDPIVCPALWEAVLYTLTTIEDCWLHVNAKKSVFPKLSTVIREGGRGLATVIYPYLLPFISKLPQSITNPKLDFFKNFLTSLVAGLSTERTKTSSLESSAVISAFFECLRFIMQQNLGEEEIEQMLVNDQ

SEQ ID NO: 99454 - protein, 885 aa, Homo sapiens
LTSFCVCTGPGHQQTGYAFTHLSLQEFLAALHLMASPKVNKDTLTQYVTLHSRWVQRTKARLGLSDHLPTFLAGLASCTCRPFLSHLAQGNEDCVGAKQAAVVQVLKKLATRKLTGPKVVELCHCVDETQEPELASLTAQSLPYQLPFHNFPLTCTDLATLTNILEHREAPIHLDFDGCPLEPHCPEALVGCGQIENLSFKSRKCGDAFAEALSRSLPTMGRLQMLGLAGSKITARGISHLVKALPLCPQLKEVSFRDNQLSDQVVLNIVEVLPHLPRLRKLDLSSNSICVSTLLCLARVAVTCPTVRMLQAREADLIFLLSPPTETTAELQRAPDLQESDGQRKGAQSRSLTLRLQKCQLQVHDAEALIALLQEGPHLEEVDLSGNQLEDEGCRLMAEAASQLHIARKLDLSNNGLSVAGVHCVLRAVSACWTLAELHISLQHKTVIFMFAQEPEEQKGPQERAAFLDSLMLQMPSELPLSSRRMRLTHCGLQEKHLEQLCKALGGSCHLGHLHLDFSGNALGDEGAARLAQLLPGLGALQSLNLSENGLSLDAVLGLVRCFSTLQWLFRLDISFESQHILLRGDKTSSLSECPLEPPSLTRLCATLKDCPGPLELQLSCEFLSDQSLETLLDCLPQLPQLSLLQLSQTGLSPKSPFLLANTLSLCPRVKKVDLRSLHHATLHFRSNEEEEGVCCGFTGCSLSQEHVESLCWLLSKCKDLSQVDLSANLLGDSGLRCLLECLPQVPISGLLDLSHNSISQESALYLLETLPSCPRVREASVNLGSEQSFRIHFSREDQAGKTLRLSECSFRPEHVSRLATGLSKSLQLTELTLTQCCLGQKQLAILLSLVGRPAGLFSLRDSTRHTEKLSFPTLEACALGFKKK

SEQ ID NO: 99455 - protein, 2717 aa, Homo sapiens
MPRTKQIHPRNLRDKIEEAQKELNGAEVSKKEILQAGVKGTSESLKGVKRKKIVAENHLKKIPKSPLRNPLQAKHKQNTEESSFAVLHSASESHKKQNYIPVKNGKQFTKQNGETPGIIAEASKSEESVSPKKPLFLQQPSELRRWRSEGADPAKFSDLDEQCDSSSLSSKTRTDNSECISSHCGTTSPSYTNTAFDVLLKAMEPELSTLSQKGSPCAIKTEKLRPNKTARSPPKLKNSSMDAPNQTSQELVAESQSSCTSYTVHMSAAQKNEQGAMQSASHLYHQHEHFVPKSNQHNQQLPGCSGFTGSLTNLQNQENAKLEQVYNIAVTSSVGLTSPSSRSQVTPQNQQMDSASPLSISPANSTQSPPMPIYNSTHVASVVNQSVEQMCNLLLKDQKPKKQGKYICEYCNRACAKPSVLLKHIRSHTGERPYPCVTCGFSFKTKSNLYKHKKSHAHTIKLGLVLQPDAGGLFLSHESPKALSIHSDVEDSGESEEEGATDERQHDLGAMELQPVHIIKRMSNAETLLKSSFTPSSPENVIGDFLLQDRSAESQAVTELPKVVVHHVTVSPLRTDSPKAMDPKPELSSAQKQKDLQVTNVQPLSANMSQGGVSRLETNENSHQKGDMNPLEGKQDSHVGTVHAQLQRQQATDYSQEQQGKLLSPRSLGSTDSGYFSRSESADQTVSPPTPFARRLPSTEQDSGRSNGPSAALVTTSTPSALPTGEKALLLPGQMRPPLATKTLEERISKLISDNEALVDDKQLDSVKPRRTSLSRRGSIDSPKSYIFKDSFQFDLKPVGRRTSSSSDIPKSPFTPTEKSKQVFLLSVPSLDCLPITRSNSMPTTGYSAVPANIIPPPHPLRGSQSFDDKIGAFYDDVFVSGPNAPVPQSGHPRTLVRQAAIEDSSANESHVLGTGQSLDESHQGCHAAGEAMSVRSKALAQGPHIEKKKSHQGRGTMFECETCRNRYRKLENFENHKKFYCSELHGPKTKVAMREPEHSPVPGGLQPQILHYRVAGSSGIWEQTPQIRKRRKMKSVGDDEELQQNESGTSPKSSEGLQFQNALGCNPSLPKHNVTIRSDQQHKNIQLQNSHIHLVARGPEQTMDPKLSTIMEQQISSAAQDKIELQRHGTGISVIQHTNSLSRPNSFDKPEPFERASPVSFQELNRTGKSGSLKVIGISQEESHPSRDGSHPHQLALSDALRGELQESSRKSPSERHVLGQPSRLVRQHNIQVPEILVTEEPDRDLEAQCHDQEKSEKFSWPQRSETLSKLPTEKLPPKKKRLRLAEIEHSSTESSFDSTLSRSLSRESSLSHTSSFSASLDIEDVSKTEASPKIDFLNKAEFLMIPAGLNTLNVPGCHREMRRTASEQINCTQTSMEVSDLRSKSFDCGSITPPQTTPLTELQPPSSPSRVGVTGHVPLLERRRGPLVRQISLNIAPDSHLSPVHPTSFQNTALPSVNAVPYQGPQLTSTSLAEFSANTLHSQTQVKDLQAETSNSSSTNVFPVQQLCDINLLNQIHAPPSHQSTQLSLQVSTQGSKPDKNSVLSGSSKSEDCFAPKYQLHCQVFTSGPSCSSNPVHSLPNQVISDPVGTDHCVTSATLPTKLIDSMSNSHPLLPPELRPLGSQVQKVPSSFMLPIRLQSSVPAYCFATLTSLPQILVTQDLPNQPICQTNHSVVPISEEQNSVPTLQKGHQNALPNPEKEFLCENVFSEMSQNSSLSESLPITQKISVGRLSPQQESSASSKRMLSPANSLDIAMEKHQKRAKDENGAVCATDVRPLEALSSRVNEASKQKKPILVRQVCTTEPLDGVMLEKDVFSQPEISNEAVNLTNVLPADNSSTGCSKFVVIEPISELQEFENIKSSTSLTLTVRSSPAPSENTHISPLKCTDNNQERKSPGVKNQGDKVNIQEQSQQPVTSLSLFNIKDTQQLAFPSLKTTTNFTWCYLLRQKSLHLPQKDQKTSAYTDWTVSASNPNPLGLPTKVALALLNSKQNTGKSLYCQAITTHSKSDLLVYSSKWKSSLSKRALGNQKSTVVEFSNKDASEINSEQDKENSLIKSEPRRIKIFDGGQSNEEYVYVRGRGRGKYICEECGIRCKKPSMLKKHIRTHTDVRPYHCTYCNFSFKTKGNLTKHMKSKAHSKKCVDLGVSVGLIDEQDTEESDEKQRFSYERSGYDLEESDGPDEDDNENEDDDEDSQAESVLSATPSVTASPQHLPSRSSLQDPVSTDEDVRITDCFSGVHTDPMDVLPRALLTRMTVLSTAQSDYNRKTLSPGKARQRAARDENDTIPSVDTSRSPCHQMSVDYPESEEILRSSMAGKAVAITQSPSSVRLPPAAAEHSPQTAAGMPSVASPHPDPQEQKQQITLQPTPGLPSPHTHLFSHLPLHSQQQSRTPYNMVPVGGIHVVPAGLTYSTFVPLQAGPVQLTIPAVSVVHRTLGTHRNTVTEVSGTTNPAGVAELSSVVPCIPIGQIRVPGLQNLSTPGLQSLPSLSMETVNIVGLANTNMAPQVHPPGLALNAVGLQVLTANPSSQSSPAPQAHIPGLQILNIALPTLIPSVSQVAVDAQGAPEMPASQSKACETQPKQTSVASANQVSRTESPQGLPTVQRENAKKVLNPPAPAGDHARLDGLSKMDTEKAASANHVKPKPELTSIQGQPASTSQPLLKAHSEVFTKPSGQQTLSPDRQVPRPTALPRRQPTVHFSDVSSDDDEDRLVIAT

SEQ ID NO: 99456 - protein, 720 aa, Homo sapiens
MAQEAPQEDTSPMALMDKGENELTGSASEESQETTTSTIITTTVITTEQAPALCSVSFSNPEGYIDSSDYPLLPLNNFLECTYNVTVYTGYGVELQVKSVNLSDGELLSIRGVDGPTLTVLANQTLLVEGQVIRSPTNTISVYFRTFQDDGLGTFQLHYQAFMLSCNFPRRPDSGDVTVMDLHSGGVAHFHCHLGYELQGAKMLTCINASKPHWSSQEPICSAPCGGAVHNATIGRVLSPSYPENTNGSQFCIWTIEAPEGQKLHLHFERLLLHDKDRMTVHSGQTNKSALLYDSLQTESVPFEGLLSEGNTIRIEFTSDQARAASTFNIRFEAFEKGHCYEPYIQNGNFTTSDPTYNIGTIVEFTCDPGHSLEQGPAIIECINVRDPYWNDTEPLCRAMCGGELSAVAGVVLSPNWPEPYVEGEDCIWKIHVGEEKRIFLDIQFLNLSNSDILTIYDGDEVMPHILGQYLGNSGPQKLYSSTPDLTIQFHSDPAGLIFGKGQGFIMNYIEVSRNDSCSDLPEIQNGWKTTSHTELVRGARITYQCDPGYDIVGSDTLTCQWDLSWSSDPPFCEKIMYCTDPGEVDHSTRLISDPVLLVGTTIQYTCNPGFVLEGSSLLTCYSRETGTPIWTSRLPHCVSEAAAETSLEGGNMALAIFIPVLIISLLLGGAYIYITRCRYYSNLRLPLMYSHPYSQITVETEFDNPIYETGETREYEVSI

SEQ ID NO: 99457 - protein, 205 aa, Homo sapiens
  MOD_RES (1)..(1): Any amino acid
XGWEGSASYKLTFTAGGAIEFGQRMLQVASQASRGEVPSGAYGYSYMPSGAYVYPPPVANGMYPCPPGYPYPPPPPEFYPGPPMMDGAMGYVQPPPPPYPGPMEPPVSGPDVPSTPAAEAKAAEAAASAYYNPGNPHNVYMPTSQPPPPPYYPPEDKKTQRSFLTGTRECMSVHLVAAGWGREQGPLTLCAGRDLPPAPQPASSP

SEQ ID NO: 99458 - protein, 36 aa, Homo sapiens
MAAAAAAGEARRVLVYGGRGALGSRCVQAFRARNWI

SEQ ID NO: 99459 - protein, 87 aa, Homo sapiens [sequence omitted]

SEQ ID NO: 99460 - protein, 162 aa, Homo sapiens
MFPDQPEKPLNLAHIVPPRPVTSMNDTLFSHSVPSSGSPFITRSMLESSNRLDEEHRLIARYAARLAAESSSSQPPQQRSAPDISFTIDANKQQRQLIAELENKNREILQEIQRLRLEHEQASQPTPEKAQQNPTLLAELRLLSAKMSWNRECLLSRRAGES

SEQ ID NO: 99461 - protein, 74 aa, Homo sapiens
MTDPVTLNVGGHLYTTSLTTLTRYPDSMLGAMFGGDFPTARDPQGNYFIDRDGPLFRYVLNFLRTSELTLPLDF

SEQ ID NO: 99462 - protein, 287 aa, Homo sapiens
  MOD_RES (1)..(1): Any amino acid
XQITHRLSKLSERRPSVQIDSGSSVPSDQSPSVQIDSGSSVPSDQRPSVQIDRRMSGKVRRRSSEKTDYRLAGLADPGTSEQTDLRLYGLVDHKTSVKTHHQVYGQATELAEHQAIDQAHSNADQPPVDNAHYTESDQTDHLADRQANHKDQLSYYETRGQSEDRIFPQLGNSKEDKEADYRVQPCKFEDSQVDLNSKPSVEMETQNATTIPPYNPVDARFTSNFQAKDQALFPRLPSISSKLNYTSSQEKTQAIVTKSFMKILTKFHSNTWKNTTFCKYSSRLLKT

SEQ ID NO: 99463 - protein, 88 aa, Homo sapiens
MGETEKRIETHRIRCLSKLKMFLLAITCAFVSKTLSGSYMNSMLTQIERQFNIPTSLVGFINGSFEIGNLLLIIFVSYFGTKLHRPIM

SEQ ID NO: 99464 - protein, 95 aa, Homo sapiens
FSGFTQKLAGAWASEAYSPQGLKPVVSTEAPPIIFATPTKLTSDSTVYDYAGKNKVPELQKFFQETYLQTILFLWLLETPVVGILDKGTFPAGLQ

SEQ ID NO: 99465 - protein, 70 aa, Homo sapiens
  MOD_RES (1)..(1): Any amino acid
XTVRAMTHVINQGMAMYWGTSRWSSMEIMVRWPRSMCVSRHRLPAPAAYGDPKALAGSVPLVPTAPMPGC

SEQ ID NO: 99466 - protein, 984 aa, Homo sapiens
MDSTLTASEIRQRFIDFFKRNEHTYVHSSATIPLDDPTLLFANAGMNQFKPIFLNTIDPSHPMAKLSRAANTQKCIRAGGKHNDLDDVGKDVYHHTFFEMLGSWSFGDYFKELACKMALELLTQEFGIPIERLYVTYFGGDEAAGLEADLECKQIWQNLGLDDTKILPGNMKDNFWEMGDTGPCGPCSEIHYDRIGGRDAAHLVNQDDPNVLEIWNLVFIQYNREADGILKPLPKKSIDTGMGLERLVSVLQNKMSNYDTDLFVPYFEAIQKGTGARPYTGKVGAEDADGIDMAYRVLADHARTITVALADGGRPDNTGRGYVLRRILRRAVRYAHEKLNASRGFFATLVDVVVQSLGDAFPELKKDPDMVKDIINEEEVQFLKTLSRGRRILDRKIQSLGDSKTIPGDTAWLLYDTYGFPVDLTGLIAEEKGLVVDMDGFEEERKLAQLKSQGKGAGGEDLIMLDIYAIEELRARGLEVTDDSPKYNYHLDSSGSYVFENTVATVMALRREKMFVEEVSTGQECGVVLDKTCFYAEQGGQIYDEGYLVKVDDSSEDKTEFTVKNAQVRGGYVLHIGTIYGDLKVGDQVWLFIDEPRRRPIMSNHTATHILNFALRSVLGEADQKGSLVAPDRLRFDFTAKGAMSTQQIKKAEEIANEMIEAAKAVYTQDCPLAAAKAIQGLRAVFDETYPDPVRVVSIGVPVSELLDDPSGPAGSLTSVEFCGGTHLRNSSHAGAFVIVTEEAIAKGIRRIVAVTGAEAQKALRKAESLKKCLSVMEAKVKAQTAPNKDVQREIADLGEALATAVIPQWQKDELRETLKSLKKVMDDLDRASKADVQKRVLEKTKQFIDSNPNQPLVILEMESGASAKATQGPGSPPLGLISSLALNEALKLFKMHSPQTSAMLFTVDNEAGKITCLCQVPQNAANRGLKASEWVQQVSGLMDGKGGGKDVSAQATGKNVGCLQEALQLATSFAQLRLGDVKN

SEQ ID NO: 99467 - protein, 126 aa, Homo sapiens
MPQAFLLGSIHEPAGALMEPQPCPGSLAESFLEEELRLNAELSQLQFSEPVGIIYNPVEYAWEPHRNYVTRYCQGPKEVLFLGMNPGPFGMAQTGVKGLASPVGGVGGSRWMLGWVCCGEGACAWL

SEQ ID NO: 99468 - protein, 204 aa, Homo sapiens
MAKLNYVEGDYKEALNIYARVGLDDLPLTAVPPYRLRVIAEAYATKGLCLEKLPISSSTSNLHVDREQDVITCYEKAGDIALLYLQEIERVILSNIQNRSPKPGPAPHDQELGFFLETGLQRAHVLYFKNGGTDGNIKEPRMWFRVIEQDETRNLTRGVGRFRELLRAVETRTTQNLRMTIARQLAEILLRGMCEQSYWNPLED

SEQ ID NO: 99469 - protein, 236 aa, Homo sapiens
MGKVFFGQLRAAEMEHLLERSWYAVTETCLAFTVFRDDFSPRFVALFTLLLFLKCFHWLAEDRVDFMERSPNISWLFHCRIVSLMFLLGILDFLFVSHAYHSILTRGASVQLVFGFEYAILMTMVLTIFIKYVLHSVDLQSENPWDNKAVYMLYTELFTGFIKVLLYMAFMTIMIKVHTFPLFAIRPMYLAMRQFKKAVTDAIMSRRAIRNMNTLYPDATPEELQAMDNVCIICRE

SEQ ID NO: 99470 - protein, 12 aa, Homo sapiens
MHQNIYDYIHVD

SEQ ID NO: 99471 - protein, 100 aa, Homo sapiens
GVITDRGGGSQHYPEERHVVERHGRDTSGPRKEWHGPPSQGPSYHDTRRMGDGRAGAGMITQHSSNASPINRIVQISGNSMPRGSGSGFKPFKGGPPRRF

SEQ ID NO: 99472 - protein, 599 aa, Homo sapiens
MSPLFSWVAKVPEIISSIRQAGKIARQEELHCPSEFDDTFSKKFEVLFCGRVTVAHKKAPPALIDECIEKFNHVSGSRGSESPRPNPPHAAPTGSQEPVRRPMRKSFSQPGLRSLAFRKELQDGGLRSSGFFSSFEESDIENHLISGHNIVQPTDIEENRTMLFTIGQSEVYLISPDTKKIALEKNFKEISFCSQGIRHVDHFGFICRESSGGGGFHFVCYVFQCTNEALVDEIMMTLKQAFTVAAVQQTAKAPAQLCEGCPLQSLHKLCERIEGMNSSKTKLELQKHLTTLTNQEQATIFEEVQKLRPRNEQRENELIISFLRCLYEEKQKEHIHIGEMKQTSQMAAENIGSELPPSATRFRLDMLKNKAKRSLTESLESILSRGNKARGLQEHSISVDLDSSLSSTLSNTSKEPSVCEKEALPISESSFKLLGSSEDLSSDSESHLPEEPAPLSPQQAFRRRANTLSHFPIECQEPPQPARGSPGVSQRKLMRYHSVSTETPHERKDFESKANHLGDSGGTPVKTRRHSWRQQIFLRVATPQKACDSSSRYEDYSELGELPPRSPLEPVCEDGPFGPPPEEKKRTSRELRELWQKAI

SEQ ID NO: 99473 - protein, 93 aa, Homo sapiens
NKKGGASKPRTARGGGLSLLPPPPGGKVTIPPPSSSVAISNHVTPPPIPKSNHGGSDADILLDLDSPAPVTTPAPTPVSVSNDLWGDFSTASR

SEQ ID NO: 99474 - protein, 213 aa, Homo sapiens
MPNFVVDWRVYTDSLFLTVDFGLCAEESSTSRKRTTEDDIPTLPTSEHKCIHSREDEDLIENLAQDETSRLDLGFEEWDVAGLPWWFLGNLRSNYTPRSNGSTDLQTNQDVGTAIVSDTTDDLWFLNESVSEQLGVGIKVEAADTEQTSEEVGKVSDKKVIEVGKNDDLEDSKSLSDDTDVEVTSEDEWQCTECKKFNSPSKRYCFRCWALRK

SEQ ID NO: 99475 - protein, 163 aa, Homo sapiens
MACEIMPLQSSQEDERPLSPFYLSAHVPQVSNVSATGELLERTIRSAVEQHLFDVNNSGGQSSEDSESGTLSASSATSARQRRRQSKEQDEVRHGRDKGLINKENTPSGFNHLDDCILNTQEVEKVHKNTFGCAGERSKPKRQKSSTKLSELHDNQDGLVERK

SEQ ID NO: 99476 - protein, 124 aa, Homo sapiens
  MOD_RES (1)..(1): Any amino acid
XAENKFAKCLMTCLKCCFWCLEKFIKFLNRNAYIMIAIYGTNFCTSARNAFFLLMRNIIRDPGFLLLHPPYQDRAGYSTTPQLLLGSYTDGDRWLLLDCTRFLQRLWHVCGHAVPLLLGGPGEE

SEQ ID NO: 99477 - protein, 291 aa, Homo sapiens
MGGAVVDEGPTGVKAPDGGWGWAVLFGCFVITGFSYAFPKAVSVFFKELIQEFGIGYSDTAWISSILLAMLYGTGPLCSVCVNRFGCRPVMLVGGLFASLGMVAASFCRSIIQVYLTTGVITGLGLALNFQPSLIMLNRYFSKRRPMANGLAAAGSPVFLCALSPLGQLLQDRYGWRGGFLILGGLLLNCCVCAALMRPLVVTAQPGSGPPRPSRRLLDLSVFRDRGFVLYAVAASVMVLGLFVPPVFVVSYAKDLGVPDTKAAFLLTILGFIDIFARPAAGFVAGLGKVR

SEQ ID NO: 99478 - protein, 91 aa, Homo sapiens
MESGTSSPQPPQLDPLDAFPQKGLEPGDIAVLVLYFLFVLAVGLWSTVKTKRDTVKGYFLAGGDMVWWPVGASLFASNVGSGHFIGLAGSG

SEQ ID NO: 99479 - protein, 120 aa, Homo sapiens
MMYGGMRGMKGLVYETSVLDPDEGIRFRGFSIPECQKLLPKAKGGEEPLPEGLFWLLVTGHIPTEEQVSWLSKEWAKRAALPSHVVTMLDNFPTNLHPMSQLSAAVTALNSESNFARAYA

SEQ ID NO: 99480 - protein, 196 aa, Homo sapiens
MADKQISLPAKLINGGIAGLIGVTCVFPIDLAKTRLQNQQNGQRVYTSMSDCLIKTVRSEGYFGAAVNLTLVTPEKAIKLAANDFFRHQLSKDGQKLTLLKEMLAGCGAGTCQVIVTTPMEMLKIQLQDAGRIAAQRKILAAQGQLSAQGGAQPSVEAPAAPRPTATQLTRDLLRSRGIAGLYKGLGATLLRDVPF

SEQ ID NO: 99481 - protein, 81 aa, Homo sapiens
MTMGDMKTPDFDDLLAAFDIPDMVDPKAAIESGHDDHESHMKQNAHGEDDSHAPSSSDVGVSVIVKNVRNIDSSEGGEKDG

SEQ ID NO: 99482 - protein, 386 aa, Homo sapiens
MKRRNADCSKLRRPLKRNRITEGIYGSTFLYLKFLVVWALVLLADFVLEFRFEYLWPFWLFIRSVYDSFRYQGLAFSVFFVCVAFTSNIICLLFIPIQWLFFAASTYVWVQYVWHTERGVCLPTVSLWILFVYIEAAIRFKDLKNFHVDLCRPFAAHCIGYPVVTLGFGFKSYVSYKMRLRKQKEVQKENEFYMQLLQQALPPEQQMLQKQEKEAEEAAKGLPDMDSSILIHHNGGIPANKKLSTTLPEIEYREKGKEKDKDAKKHNLGINNNNILQPVDSKIQEIEYMENHINSKRLNNDLVGSTENLLKEDSCTASSKNYKNASGVVNSSPRSHSATNGSIPSSSSKNEKKQKCTSKSPSTHKDLMENCIPNNQLSKPDALVRH

SEQ ID NO: 99483 - protein, 6406 aa, Homo sapiens
MKGARWRRVPWVSLSCLCLCLLPHVVPGTTEDTLITGSKTPAPVTSTGSTTATLEGQSTAASSRTSNQDISASSQNHQTKSTETTSKAQTDTLTQMMTSTLFSSPSVHNVMETVTQETAPPDEMTTSFPSSVTNTLMMTSKTITMTTSTDSTLGNTEETSTAGTESSTPVTSAVSITAGQEGQSRTTSWRTSIQDTSASSQNHWTRSTQTTRESQTSTLTHRTTSTPSFSPSVHNVTGTVSQKTSPSGETATSSLCSVTNTSMMTSEKITVTTSTGSTLGNPGETSSVPVTGSLMPVTSAALVTVDPEGQSPVTFSRTSTQDTTAFSKNHQTQSVETTRVSQINTLNTLTPVTTSTVLSSPSGFNPSGTVSQETFPSGETTISSPSSVSNTFLVTSKVFRMPISRDSTLGNTEETSLSVSGTISAITSKVSTIWWSDTLSTALSPSSLPPKISTAFHTQQSEGAETTGRPHERSSFSPGVSQEIFTLHETTTWPSSFSSKGHTTWSQTELPSTSTGAATRLVTGNPSTGAAGTIPRVPSKVSAIGEPGEPTTYSSHSTTLPKTTGAGAQTQWTQETGTTGEALLSSPSYSVTQMIKTATSPSSSPMLDRHTSQQITTAPSTNHSTIHSTSTSPQESPAVSQRGHTQAPQTTQESQTTRSVSPMTDTKTVTTPGSSFTASGHSPSEIVPQDAPTISAATTFAPAPTGDGHTTQAPTTALQAAPSSHDATLGPSGGTSLSKTGALTLANSVVSTPGGPEGQWTSASASTSPDTAAAMTHTHQAESTEASGQTQTSEPASSGSRTTSAGTATPSSSGASGTTPSGSEGISTSGETTRFSSNPSRDSHTTQSTTELLSASASHGAIPVSTGMASSIVPGTFHPTLSEASTAGRPTGQSSPTSPSASPQETAAISRMAQTQRTRTSRGSDTISLASQATDTFSTVPPTPPSITSSGLTSPQTQTHTLSPSGSGKTFTTALISNATPLPVTYASSASTGHTTPLHVTDASSVSTGHATPLPVTDTSSESTGHATPLPVTSPSSVSTGHTTPLPVTDTSSESTGHVTPLPVTSLSSASTGDSTPLPVTDTSSASTGHVTPLPVTSLSSASTGDTTPLPVTDTSSASTGHATSLPVTDTSSVSTGHTTPLPVTDTSSASTGHATSLPVTDTSSVSTAHATPLPVTGLSSASTDDTTRLPVTDVSSASTGQAIPLPVTSPSSASTGDTTPLPVTDASSASTGDTTSLPVTIPSSASSGHTTSLPVTDASSVSTGHATSLLVTDASSVSTGDTTPLPVTDTNSASTGDTTPLHVTDASSVSTGHATSLPVTSLSSASTGDTTPLPVTSPSSASSGHTTPLPVTDASSVPTGHATSLPVTDASSVSTGHATPLPVTDASSVSTGHATPLPVTDTSSVSTGQATPLPVTSLSSASTGDTTPLPVTDTSSASTGQDTPLPVTSLSSVSTGDTTPLPVTSPSSASTGHATPLLVTDASSVSTGHATSLLVTDASSVSTGHATALHVTDASSLSTGDTTPLPVTSPSSASTGDTTPLPVTDTSSASTGHATSLPVTDTSSASTGHATPLPVTDTSSASTGQATPLPVTGPSSASTGHAIPLLVTDTSSASTGQATPLPVTSLSSASTGDTTPLPVTDASSVSTGHATSLPVTSLSSVSTGDTTPLPVTSPSSASSGHTTPLPVTDASSVSTGDTTPLPVTSPSSASSGHTTPLPVTSPSSASSGHTTPLPVTDASSASTGDTTPLPVTDTSSASTGHATHLPVTGLSSASTGDTTRLPVTNVSSASTGHATPLPVTSTSSASTGDTTPLPGTDTSSVSTGHTTPLLVTDASSVSTGDTTRLPVTSPSSASTGHTTPLPVTDTPSASTGDTTPLPVTNASSLSTRHTTSLHVTSPSSASTGHATSLPVTDTSSVSTGHATPLHVTSPSSASTGDTTPLPVTDTYSASTGQATPLPVTDTSSASTGDTTPLPVTDTSSASTGHATPLPVTNTSSVSTGHATPLHVTSPSSASTGHTTPLPVTDASSVSTGHATSLPVTDASSVFTGHATSLPVTIPSSASSGHTTPLPVTDASSVSTGHATSLPVTDASSVSTGHATPLPVTDASSVSTGHATPLPVTDTSSVSTGHATPLPLTSLSSVSTGDTTPLPVTDTSSASTGQATPLPVTSLSSVSTGDTTPLPVTDTSSASTGHATSLPVTDTSSASTGHATPLPDTDTSSASTGHATPLPVTDTSSASTGHATLLPVTDTSSASIGHATPLPVTDTSSISTGHATPLHVTSPSSASTGHATPLPVTDTSSASTGHANPLHVTSPSSASTGHATPLPVTDTSSASTGHATPLPVTSLSSVSTGDTTPLPVTSPSSASTGHTTPLPVTDTSSASTGQATALPVTSTSSASTGDTTPLPVTDTSSASTGQATPLPVTSLSSVSTGDTTPLPVTSPSSASTGHATPLLVTDASSASTGQATPLPVTDTSSAYTGDTTSLPVTDTSSSSTGDTTPLLVTETSSASTGHATPLHVTSPSSASTGDTTPVPVTDTSSVSTGHATPLPVTGLSSASTGDTTRLPVTDISSASTGQATPLPVTNTSSASTGHATPLPVTGLSSASTGDTTRLPVTDISSASTGQATPLPVTNTSSVSTGDTMPLPVTSPSSASTGHATPLPVTSTSSASTGHATPVPVTSTSSASTGHTTPLPVTDTSSASTGDTTPLPVTSPSSASTGHTTPLHVTIPSSASTGDTSTLPVTGASSASTGHATPLPVTDTSSVSTGHATPLPVTSFSSVSTGDTTPLPVTDTSSVSTGHATPLPVTSFSSVSTGDTTPLPVTDASSASTGHATPLPVTDTSSVSTGHATPLPLTSLSSVSTGDTTTLPVTDTSSVSTGHATPLPVTSFSSVSTGDTTPLPVTDASSASTGHATPLPVTDTSSVSTGHATPLPVTSLSSVSTGDTTPLPVTDASSASTGQATPLPVTSLSSVSTGDTTPLPVTIPSSASSGHTTSLPVTDTSSASTGQATPLPVTSLSSVSTGDTTPLLVTDASSVSTGHATPLPVTDTSSASTGDTTRLPVTDTSSASTGQATPLPVTSLSSVSTGDTTPLLVTNTSSVSRGHATSLPVTIPSSSSSGHTTPLPVTSTSSVSTGHVTPLPVTSTSSASTGHATSLPVTDTSSVSTGHATSLPVTDTSSVSTGHATPLPVTDASSVSTGHATPLPVTDASSASTGDTTPLPVTNTSSASTGQATPLPVTSLSSVSTGDTMPLPVTSPSSASTGHATPLPVTGLSSASTGDTTPLPVTDTSSASTGHVTPLPVTSLSSASTGDSTPLPVTDTSSASTGHVTPLPVTSLSSASTGDTTPLPVTDTSSASTGHATPLHVTDASSASTGQATLLPVTSLSSVSTGDTTPLPVTSPSSASTGHATPLLVTDTSSASTGHATPLPVTDASSVSTGHATSLPVTIRSSGSTGHTTPLPVTDTSSASTGQATSLLVTDTSSVSTGDTTPLPVTSTSSASTGHVTPLHVTSPSSASTGHATPLPVTSLSSASTGDTMPLPVTSPSSASTGDTTPLPVTDASSVSTGHTTPLPVTSPSSASTGHTTPLPVTDTTSASKGDTTPLPVTSPSSASTGHTTPLPVTDTSSASTGDTTPLPVTSPSSASTGHATPLPVTNASSLSTGHATPLHVTSPSSASTGHATPLPVTSTSSASTGHATSLPVTSTSSASTGHATPLPVTDNSSVSTGHATPLPVTGLSSATTDDTTRLPVTDVSSASTGQATPLPVTSLSSVSTGDTTPLPVTSPSSASTGHASPLLVTDASSASTGQATPLPVTDTSSVSTAHATPLPVTGLSSASTDDTTRLPVTDVSSASTGQAIPLPVTSPSSASTGDTTPLPVTDASSASTGDTTSLPVTIPSSASSGHTTSLPVTDASSVSTGHATSLLVTDASSVSTGDTTPLPVTDTNSASTGDTTPLHVTDASSVSTGHATSLPVTSLSSASTGDTTPLPVTSPSSASSGDTTPLPVTDTSSASTGHATHLPVTGLSSASTGDTTRLPVTNVSSASTGHATPLPVTSTSSASTGDTTPLPGTDTSSVSTGHTTPLLVTDASSVSTGDTTRLPVTSPSSASTGHTTPLHVTDASSVSTGHTTPLPVTDTSSASTGQATSLLVTDTSSVSTGDTTPLPVTSTSSASTGHVTPLHVTSPSSASTGHATPLPVTSLSSASTGDTTPLPVTDTSSVSTGHTTPLPVTSPSSASTGHTTPLPVTDTSSASKGDTTPLPVTSPSSASTGHTTPLPVTDTSSASTGDTTPLPVTNASSLSTGHATPLHVTSPSSASTGHATPLPVTSTSSASTGHATPLPVTSTSSASTGHATPLPVTDNSSVSTGHATPLPVTGLSSATTDDTTRLPVTDVSSASTGQATPLPVTSLSSVSTGDTTPLPVTSPSSASTGHASPLLVTDASSASTGQATPLPVTDTSSVSTAHATPLPVTGLSSASTDDTTRLPVTDVSSASTGQAIPLPVTSPSSASTGDTTPLPVTDASSASTGDTTSLPVTIPSSASSGHTTSLPVTDASSVSTGHATSLLVTDASSVSTGDTTPLPVTDTNSASTGDTTPLHVTDASSVSTGHATSLPVTSLSSASTGDTTPLPVTSPSSASSGHTTSLPVTDASSVSTGHATSLPVTIPSSASSGHTTPLPVTDASSVPTGHATSLPVTDASSVSTGHATPLPVTDASSVSTGHATPLPVTDTSSVSTGQATPLPVTSLSSASSTGDTTPLPVTDTSSASTGQDTPLPVTSLFSVSTGDTTPLPVTSPSSASTGHATHLLVTDASSVSTGHATSLLVTDASSVSTGHATALHVTDASSLSTGDTTPLPVTSPSSASTGDTTPLPVTDTSSVSTGHATSLPVTDTSSASTGHATSLPVTDTSSASTGQATPLPVTSPSSASTGHAIPLLVTDTSSASTGQATPLPVTSLSSASTGDTTPLPVTDASSVSTGHATSLPVTSLSSVSTGDTTPLPVTSPSSASTGHATPLHVTSPSSASTGHATPLPVTSLSSASTGDTTPLPVTSPSSASTGHATPLHVTDASSVSTGDTTPLPVTSPSSASSGHTTPLPVTDASSASTGDTTPLPVTDTSSASTGHATHLPVTGLSSASTGDTTRLPVTDVSSASTGHATPLPVTSTSSASTGDTTPLPGTDTSSVSTGHTTPLLVTDASSVSTGDTTRLPVTSPSSASTGHTTPLPVTDTPSASTGDTTPLPVTNASSLSTRHATSLHVTSPSSASTGHATPLPVTDTSAASTGHATPLPVTSTSSASTGDTTPLPVTDTSSASTGHATPLPVTNTSSVSTGHATPLHVTSPSSASTGHTTPLPVTDASSVSTGHATSLPVTDASSVSTGHATPLPVTDASSVSTGHATPLPLTSLSSVSTGDTTPLPVTDTSSASTGQATPLPVTSLSSVSTGDTTPLPVTDTSSASTGHATSLPVTDTSSASTGHATPLPVTDTSSISTGHATPLHVTSPSSASTGHATPLPVTDTSSASTGHATPLPVTSLSSVSTGDTTPLPVTSPSSASTGHATPLLVTDASSASTGQATPLPVTSLSSVSTGDTTPLPVTSPSSASTGHATSLPVTDTSSASTGDTTSLPVTDTSSAYTGDTTSLPVTDTSSSSTGDTTPLLVTETSSASTGDTTPVPVTDTSSVSTGHATPLPVTGLSSASTGDTTRLPVTDISSASTGQATPLPVTNTSSVSTGDTMPLPVTSPSSASTGHATPLPVTSTSSASTGHATPVPVTSTSLASTGHTTPLPVTSPSSASTGHTTPLPVTDTSSASTGDTTPLPVTNASSLSTGHTTPLHVTIPSSASTGDTSTLPVTGASSASTGHATPLPVTDTSSVSTGHATPLPVTSFSSVSTGDTTPLPVTDASSASTGHATPLPVTDTSSASTGDTTPLPVTDASSASTGQATPLPVTSLSSVSTGDTTPLPVTIPSSASSGHTTSLPVSDTSSASTGQATPLPVTSLSSVSTGDTTPLLVTDASSVSTGHATPLPVTDTSSASTGDTTRLPVTDTSSASTGQATPLPVTSLSSVSTGDTTPLLVTNTSSVSTGHATSLPVTIPSSSSSGHTTPLPVTSTSSVSTGHVTPLHVTSPSSSSTGQATPLPVTSTSSVSTGHVTPLHVTSPSSASTGHATPLPVTSTSSASTGHATPLPVTDASSVSTGHATPLPVTDTSSASTGDTTPLPVTDTSSASTGQATPLPVTSLSSVSTGHATPLAVSSATSASTVSSDSPLKMETSGMTTPSLKTDGGRRTATSPPPTTSQTIISTIPSTAMHTRSTAAPIPILPERGVSLFPYGADAGDLEFVRRTVDFTSPLFKPATGFPLGSSLRDSLYASQAGTLWPWWLRSGTMLTSPLVGGPHFIRNTRRSMVNTAC

SEQ ID NO: 99484 - protein, 56 aa, Homo sapiens
MDLIPNFAMETWVLVATSLVLLYMVFGILTENVMKNTEKCGAFRSNGISEKCLKFC

SEQ ID NO: 99485 - protein, 296 aa, Homo sapiens
MFEACSQGPLNICEEMTILHGGFLLAEQLFHPKALAELTKSDWERVGRPIVEALREISSAAAHSQPFAWKKKALIIIWAKVLQPHPVTPSDTETRWQEDLFFSVGNMIPTINHTILFELLKSLEASGLFIQLLMALPTTICHAELERFLEHVTVDTSAEDVAFFLDVWWEVMKHKGHPQDPLLSQFSAMAHKYLPALDEFPHPPKRLRSDPDACPTMPLLAMLLRGLTQIQSRILGPGRKCCALANLADMLTVFALTEDDPQEVSATVYLDKLATVISVWNSDTQNPYHQQALAEK

SEQ ID NO: 99486 - protein, 1228 aa, Homo sapiens [sequence omitted]

SEQ ID NO: 99487 - protein, 320 aa, Homo sapiens
  MOD_RES (1)..(1): Any amino acid
XGRKEYPMYSGEKAYIQGLKEKFPQEEAIIDKYIKLVKVVSSGAPHAILLKFLPLPVVQLLDRCGLLTRFSPFLQASTQSLAEVLQQLGASSELQAVLSYIFPTYGVTPNHSAFSMHALLVNHYMKGGFYPRGGSSEIAFHTIPVIQRAGGAVLTKATVQSVLLDSAGKACGVSVKKGHELVNIYCPIVVSNAGLFNTYEHLLPGNARCLPGVKQQLGTVRPGLGMTSVFICLRGTKEDLHLPSTNYYVYYDTDMDQAMERYVSMPREEAAEHIPLLFFAFPSAKDPTWEDRFPGGECDCRIPTHQPVLSGCSPRCLLRG

SEQ ID NO: 99488 - protein, 185 aa, Homo sapiens
MRFRYKCEGRSAGSIPGERSTDTTKTHPTIKINGYTGPGTVRISLVTKDPPHRPHPHELVGKDCRDGFYEAELCPDRCIHSFQNLGIQCVKKRDLEQAISQRIQTNNNPFQVPIEEQRGDYDLNAVRLCFQVTVRDPSGRPLRLPPVLSHPIFDNRAPNTAELKICRVNRNSGSCLGGDEIFLLC

SEQ ID NO: 99489 - protein, 735 aa, Homo sapiens
MSEIILEFESFDLEPDSNPPGGMFCRYDRLEIWDGFPDVGPHIGRYCGQKTPGRIRSSSGILSMVFYTDSAIAKEGFSANYSVLQSSVSEDFKCMEALGMESGEIHSDQITASSQYSTNWSAERSRLNYPENGWTPGEDSYREWIQVDLGLLRFVTAVGTQGAISKETKKKYYVKTYKIDVSSNGEDWITIKEGNKPVLFQGNTNPTDVVVAVFPKPLITRFVRIKPATWETGISMRFEVYGCKITDYPCSGMLGMVSGLISDSQITSSNQGDRNWMPENIRLVTSRSGWALPPAPHSYINEWLQIDLGEEKIVRGIIIQGGKHRENKVFMRKFKIGYSNNGSDWKMIMDDSKRKAKSFEGNNNYDTPELRTFPALSTRFIRIYPERATHGGLGLRMELLGCEVEAPTAGPTTPNGNLVDECDDDQANCHSGTGGTTVLATEKPTVIDSTIQSEFPTYGFNCEFGWGSHKTFCHWEHDNHVQLKWSVLTSKTGPIQDHTGDGNFIYSQADENQKGKVARLVSPVVYSQNSAHCMTFWYHMSGSHVGTLRVKLRYQKPEEYDQLVWMAIGHQGDHWKEGRVLLHKSLKLYQVIFEGEIGKGNLGGIAVDDISINNHISQEDCAKPADLDKKNPEIKIDETGSTPGYEGEGEGDKNISRKPGNVLKTLDPILITIIAMSALGVLLGAVCGVVLYCACWHNGMSERNLSALENYNFELVDGVKLKKDKLNTQSTYSEA

SEQ ID NO: 99490 - protein, 813 aa, Homo sapiens
MTSFQEVPLQTSNFAHVIFQNVAKSYLPNAHLECHYTLTPYIHPHPKDWVGIFKVGWSTARDYYTFLWSPMPEHYVEGSTVNCVLAFQGYYLPNDDGEFYQFCYVTHKGEIRGASTPFQFRASSPVEELLTMEDEGNSDMLVVTTKAGLLELKIEKTMKEKEELLKLIAVLEKETAQLREQVGRMERELNHEKERCDQLQAEQKGLTEVTQSLKMENEEFKKRFSDATSKAHQLEEDIVSVTHKAIEKETELDSLKDKLKKAQHEREQLECQLKTEKDEKELYKVHLKNTEIENTKLMSEVQTLKNLDGNKESVITHFKEEIGRLQLCLAEKENLQRTFLLTTSSKEDTCFLKEQLRKAEEQVQATRQEVVFLAKELSDAVNVRDRTMADLHTARLENEKVKKQLADAVAELKLNAMKKDQDKTDTLEHELRREVEDLKLRLQMAADHYKEKFKECQRLQKQINKLSDQSANNNNVFTKKTGNQQKVNDASVNTDPATSASTVDVKPSPSAAEADFDIVTKGQVCEMTKEIADKTEKYNKCKQLLQDEKAKCNKYADELAKMELKWKEQVKIAENVKLELAEVQDNYKLQLAEKDKEISGLISHLENLSREKELKRSLENPAERKMEGQNSQSPQCFKTCSEQNGYVLTLSNAQPVLQYGNPYASQETRDGADGAFYPDEIQRPPVRVPSWGLEDNVVCSQPARNFSRPDGLEDSEDSKEDENVPTAPDPPSQHLRGHGTGFCFDSSFDVHKKCPLCELMFPPNYDQSKFEEHVESHWKVCPMCSEQFPPDYDQQVFERHVQTHFDQNVLNFD

SEQ ID NO: 99491 - protein, 1178 aa, Homo sapiens
MDALIIPVTMEVPCDSRGQRMWWAFLASSMVTFFGGLFIILLWRTLKYLWTVCCHCGGKTKEAQKINNGSSQADGTLKPVDEKEEAVAAEVGWMTSVKDWAGVMISAQTLTGRVLVVLVFALSIGALVIYFIDSSNPIESCQNFYKDFTLQIDMAFNVFFLLYFGLRFIAANDKLWFWLEVNSVVDFFTVPPVFVSVYLNRSWLGLRFLRALRLIQFSEILQFLNILKTSNSIKLVNLLSIFISTWLTAAGFIHLVENSGDPWENFQNNQALTYWECVYLLMVTMSTVGYGDVYAKTTLGRLFMVFFILGGLAMFASYVPEIIELIGNRKKYGGSYSAVSGRKHIVVCGHITLESVSNFLKDFLHKDRDDVNVEIVFLHNISPNLELEALFKRHFTQVEFYQGSVLNPHDLARVKIESADACLILANKYCADPDAEDASNIMRVISIKNYHPKIRIITQMLQYHNKAHLLNIPSWNWKEGDDAICLAELKLGFIAQSCLAQGLSTMLANLFSMRSFIKIEEDTWQKYYLEGVSNEMYTEYLSSAFVGLSFPTVCELCFVKLKLLMIAIEYKSANRESRSRKRILINPGNHLKIQEGTLGFFIASDAKEVKRAFFYCKACHDDITDPKRIKKCGCKRLIYSKMSIYKRMRRACCFDCGRSERDCSCMSGRVRGNVDTLERAFPLSSVSVNDCSTSFRAFEDEQPSTLSPKKKQRNGGMRNSPNTSPKLMRHDPLLIPGNDQIDNMDSNVKKYDSTGMFHWCAPKEIEKVILTRSEAAMTVLSGHVVVCIFGDVSSALIGLRNLVMPLRASNFHYHELKHIVFVGSIEYLKREWETLHNFPKVSILPGTPLSRADLRAVNINLCDMCVILSANQNNIDDTSLQDKECILASLNIKSMQFDDSIGVLQANSQGFTPPGMDRSSPDNSPVHGMLRQPSITTGVNIPIITELVNDTNVQFLDQDDDDDPDTELYLTQPFACGTAFAVSVLDSLMSATYFNDNILTLIRTLVTGGATPELEALIAEENALRGGYSTPQTLANRDRCRVAQLALLDGPFADLGDGGCYGDLFCKALKTYNMLCFGIYRLRDAHLSTPSQCTKRYVITNPPYEFELVPTDLIFCLMQFDHNAGQSRASLSHSSHSSQSSSKKSSSVHSIPSTANRQNRPKSRESRDKQNRKEMVYR

SEQ ID NO: 99492 - protein, 422 aa, Homo sapiens
MPSPLGPPCLPVMDPETTLEEPETARLRFRGFCYQEVAGPREALARLRELCCQWLQPEAHSKEQMLEMLVLEQFLGTLPPEIQAWVRGQRPGSPEEAAALVEGLQHDPGQLLGWITAHVLKQEVLPAAQKTEEPLGSPHPSGTVESPGEGPQDTRIEGSVQLSCSVKEEPNVDGQEVAPSSPPLAAQSPEGNHGHQEPASTSFHPPRIQGLPPHQPEAQAQSELGMLLTGTGVCRSLRSGNESEGPPGCPEAQPPQGPGPAAWEGLSGAATPAPTVRPGTPPVPTQPTPAETRLEPAATPRKPYTCEQCGRGFDWKSVFVIHHRTHTSGPGVQSPGLATGESTEKPPQGEVAFPHHPRRSLTGPRSYPCEECGCSFSWKSQLVIHRKSHTGQRRHFCSDCGRAFDWKSQLVIHRKGHRPEVP

SEQ ID NO: 99493 - protein, 41 aa, Homo sapiens
MSRGSSAGFDRHITIFSPEGRLYQVGQIIGFQHSDSLIQDN

SEQ ID NO: 99494 - protein, 136 aa, Homo sapiens
IEMAILRFPYESWGTPFQQLKQVVEEPSPQLPADRFSPEFVDFTAQCLRKNPAERMSYLELMVSMGGRCLPCSSGLAGAGWGSGERAASCTQMGSSSGWPCVLSFRCSVICLLLHTWLPPPSFLHARPWEGYTGSV

SEQ ID NO: 99495 - protein, 79 aa, Homo sapiens
MFNPQLMIQTPKEEGANVLTTEALLQHLDSALQASRVHVYMYNSEKFLSLLFILLGSGNWNICVTNQESLSQKQVTWIR

SEQ ID NO: 99496 - protein, 1460 aa, Homo sapiens
MASLAALALSLLLRLQLPPLPGARAQSAAGGCSFDEHYSNCGYSVALGTNGFTWEQINTWEKPMLDQAVPTGSFMMVNSSGRASGQKAHLLLPTLKENDTHCIDFHYYFSSRDRSSPGALNVYVKVNGGPQGNPVWNVSGVVTEGWVKAELAISTFWPHFYQVIFESVSLKGHPGYIAVDEVRVLAHPCRKAPHFLRLQNVEVNVGQNATFQCIAGGKWSQHDKLWLQQWNGRDTALMVTRVVNHRRFSATVSVADTAQRSVSKYRCVIRSDGGSGVSNYAELIVKEPPTPIAPPELLAVGATYLWIKPNANSIIGDGPIILKEVEYRTTTGTWAETHIVDSPNYKLWHLDPDVEYEIRVLLTRPGEGGTGPPGPPLTTRTKCADPVHGPQNVEIVDIRARQLTLQWEPFGYAVTRCHSYNLTVQYQYVFNQQQYEAEEVIQTSSHYTLRGLRPFMTIRLRLLLSNPEGRMESEELVVQTEEDVPGAVPLESIQGGPFEEKIYIQWKPPNETNGVITLYEINYKAVGSLDPSADLSSQRGKVFKLRNETHHLFVGLYPGTTYSFTIKASTAKGFGPPVTTRIATKISAPSMPEYDTDTPLNETDTTITVMLKPAQSRGAPVSVYQLVVKEERLQKSRRAADIIECFSVPVSYRNASSLDSLHYFAAELKPANLPVTQPFTVGDNKTYNGYWNPPLSPLKSYSIYFQALSKANGETKINCVRLATKAPMGSAQVTPGTPLCLLTTGASTQNSNTVEPEKQVDNTVKMAGVIAGLLMFIIILLGVMLTIKRRRNAYSYSYYLKLAKKQKETQSGAQREMGPVASADKPTTKLSASRNDEGFSSSSQDVNGFTDGSRGELSQPTLTIQTHPYRTCDPVEMSYPRDQFQPAIRVADLLQHITQMKRGQGYGFKEEYEALPEGQTASWDTAKEDENRNKNRYGNIISYDHSRVRLLVLDGDPHSDYINANYIDGYHRPRHYIATQGPMQETVKDFWRMIWQENSASIVMVTNLVEVGRVKCVRYWPDDTEVYGDIKVTLIETEPLAEYVIRTFTVQKKGYHEIRELRLFHFTSWPDHGVPCYATGLLGFVRQVKFLNPPEAGPIVVHCSAGAGRTGCFIAIDTMLDMAENEGVVDIFNCVRELRAQRVNLVQTEEQYVFVHDAILEACLCGNTAIPVCEFRSLYYNISRLDPQTNSSQIKDEFQTLNIVTPRVRPEDCSIGLLPRNHDKNRSMDVLPLDRCLPFLISVDGESSNYINAALMDSHKQPAAFVVTQHPLPNTVADFWRLVFDYNCSSVVMLNEMDTAQFCMQYWPEKTSGCYGPIQVEFVSADIDEDIIHRIFRICNMARPQDGYRIVQHLQYIGWPAYRDTPPSKRSLLKVVRRLEKWQEQYDGREGRTVVHCLNGGGRSGTFCAICSVCEMIQQQNIIDVFHIVKTLRNNKSNMVETLEQYKFVYEVALEYLSSF

SEQ ID NO: 99497 - protein, 134 aa, Homo sapiens
  MOD_RES (1)..(1): Any amino acid
XSGLYQETCSDLYVTCQVFAEGKPLALPVRTSYKAFSTRWNWNEWLKLPVKYPDLPRNAQVALTIWDVYGPGKAVPVGGTTVSLFGKYGMFRQGMHDLKVWPNVEADGSEPTKTPGRTSSTLSEDQMSRLAKQK

SEQ ID NO: 99498 - protein, 146 aa, Homo sapiens
MKMEEAVGKVEELIESEAPPKASEQETAKEEDGSVELESQVQKDGVADSTVISSMPCLLMELRRDSSESQLASTESDKPTTGRVYESDSSNHCMLSPSSSGHLADSDTLSSAEENEPSQAETAVEGDPSGVSGATVGRKSRRSRSE

SEQ ID NO: 99499 - protein, 1064 aa, Homo sapiens
MDKGRAAKVCHHADCQQLHRRGPLNLCEACDSKFHSTMHYDGHVRFDLPPQGTQLRPTINCLWRSGSQAPRPGSVLARNVSTRSCPPRTSPAVDLEEEEEESSVDGKGDRKSTGLKLSKKKARRRHTDDPSKECFTLKFDLNVDIETEIVPAMKKKSLGEVLLPVFERKGIALGKVDIYLDQSNTPLSLTFEAYRFGGHYLRVKAPAKPGDEGKVEQGMKDSKSLSLPILRPAGTGPPALERVDAQSRRESLDILAPGRRRKNMSEFLGEASIPGQEPPTPSSCSLPSGSSGSTNTGDSWKNRAASRFSGFFSSGPSTSAFGREVDKMEQLEGKLHTYSLFGLPRLPRGLRFDHDSWEEEYDEDEDEDNACLRLEDSWRELIDGHEKLTRRQCHQQEAVWELLHTEASYIRKLRVIINLFLCCLLNLQESGLLCEVEAERLFSNIPEIAQLHRRLWASVMAPVLEKARRTRALLQPGDFLKGFKMFGSLFKPYIRYCMEEEGCMEYMRGLLRDNDLFRAYITWAEKHPQCQRLKLSDMLAKPHQRLTKYPLLLKSVLRKTEEPRAKEAVVAMIGSVERFIHHVNACMRQRQERQRLAAVVSRIDAYEVVESSSDEVDKLLKEFLHLDLTAPIPGASPEETRQLLLEGSLRMKEGKDSKMDVYCFLFTDLLLVTKAVKKAERTRVIRPPLLVDKIVCRELRDPGSFLLIYLNEFHSAVGAYTFQASGQALCRGWVDTIYNAQNQLQQLRAQEPPGSQQPLQSLEEEEDEQEEEEEEEEEEEEGEDSGTSAASSPTIMRKSSGSPDSQHCASDGSTETLAMVVVEPGDTLSSPEFDSGPFSSQSDETSLSTTASSATPTSELLPLGPVDGRSCSMDSAYGTLSPTSLQDFVAPGPMAELVPRAPESPRVPSPPPSPRLRRRTPVQLLSCPPHLLKSKSEASLLQLLAGAGTHGTPSAPSRSLSELCLAVPAPGIRTQGSPQEAGPSWDCRGAPSPGSGPGLVGCLAGEPAGSHRKRCGDLPSGASPRVQPEPPPGVSAQHRKLTLAQLYRIRTTLLLNSTLTASEV

SEQ ID NO: 99500 - protein, 273 aa, Homo sapiens
MKDMPLRIHVLLGLAITTLVQAVDKKVDCPRLCTCEIRPWFTPRSIYMEASTVDCNDLGLLTFPARLPANTQILLLQTNNIAKIEYSTDFPVNLTGLDLSQNNLSSVTNINVKKMPQLLSVYLEENKLTELPEKCLSELSNLQELYINHNLLSTISPGAFIGLHNLLRLHLNSNRLQMINSKWFDALPNLEILMIGENPIIRIKDMNFKPLINLRSLVIAGINLTEIPDNALVGLENLESISFYDNRLIKVPHVALQKVVNLKFLDLNKNPIN

SEQ ID NO: 99501 - protein, 52 aa, Homo sapiens
  MOD_RES (1)..(1): Any amino acid
XLREAQLYSVDVTLDPDTAYPSLILSDNLRQVRYSYLQQDLPDNPERSPSTT

SEQ ID NO: 99502 - protein, 182 aa, Homo sapiens
  MOD_RES (1)..(1): Any amino acid
XGREEARRLEQEAFGAADSEGTGAPSWRPQKNRSRAASGGAALASPGPGTGSGAPAGSGGKERSENLSLRRSVSELSLQGRRRRQQERRQQALSMAPGAADAQIGTADPGDFDQLTQCLIQAPSNRPYFLLLQGYQDAQTLYSTLPALLDSNPFTAGAELPGPGAELGAMPPGLRPTLGVFQ

SEQ ID NO: 99503 - protein, 59 aa, Homo sapiens
MAAAAALRAPAQSSVTFEDVAVNFSLEEWSLLNEAQRCLYRDVMLETLTLISSLEQCDL

SEQ ID NO: 99504 - protein, 197 aa, Homo sapiens
  MOD_RES (1)..(1): Any amino acid
XHFTYRTLCRGEYSILHRLKAAMGTAWRDYISICGLRTHGELGGHPVSELIYIHSKVLIADDRTVIIGSANINDRSLLGKRDSELAVLIEDTETEPSLMNGAEYQAGRFALSLRKHCFGVILGANTRPDLDLRDPICDDFFQLWQDMAESNANIYEQIFRCLPSNATRSLRTLREYVAVEPLATGPPSPLLPRWREG

SEQ ID NO: 99505 - protein, 432 aa, Homo sapiens
MSRRVVRQSKFRHVFGQAAKADQAYEDIRVSKVTWDSSFCAVNPKFLAIIVEAGGGGAFIVLPLAKTGRVDKNYPLVTGHTAPVLDIDWCPHNDNVIASASDDTTIMVWQIPDYTPMRNITEPIITLEGHSKRVGILSWHPTARNVLLSAGGDNVIIIWNVGTGEVLLSLDDMHPDVIHSVCWNSNGSLLATTCKDKTLRIIDPRKGQVVANNFEEPVALQEMDTSNGVLLPFYDPDSSIVYLCGKGDSSIRYFEITDEPPFVHYLNTFSSKEPQRGMGFMPKRGLDVSKCEIARFYKLHERKCEPIIMTVPRKSDLFQDDLYPDTPGPEPALEADEWLSGQDAEPVLISLRDGYVPPKHRELRVTKRNILDVRPPSGPRRSQSASDAPLSQQHTLETLLEEIKALRERVQAQEQRITALENMLCELVDGTD

SEQ ID NO: 99506 - protein, 1625 aa, Homo sapiens
MKGFYFAKLYYEAKEYDLAKKYICTYINVQERDPKAHRFLGLLYELEENTEKAVECYRRSVELNPTQKDLVLKIAELLCKNDVTDGRAKYWVERAAKLFPGSPAIYKLKEQLLDCEGEDGWNKLFDLIQSELYVRPDDVHVNIRLVELYRSTKRLKDAVAHCHEAERNIALRSSLEWNSCVVQTLKVPRPKIKLREGKAGQNLLEMMACDRLSQSGHMLLSLSRGKQDFLKEVVETFANKIGQSALYDALFSSQSPKDTSFLGSDDIGKIDVQEPELEDLARYDVGAIRAHNGSLQHLTWLGLQWNSLPALPGIRKWLKQLFHRLPHETSRLETNAPESICILDLEVFLLGVVYTSHLQLKEKCNSHHSSYQPLCLPFPVCKQLCTERQKSWWDAVCTLIHRKAVPGNLAKLRLLVQHEINTLRAQEKHGLQPALLVHWAKYLQKTGSGLNSFYGQLEYIGRSVHYWKKVLPLLKIIKKNSIPEPIDPLFKHFHSVDIQASEIVEYEEDAHITFAILDAVNGNIEDAVTAFESIKSVVSYWNLALIFHRKAEDIENDALSPEEQEECRNYLTKTRDYLIKIIDDGDSNLSVVKKLPVPLESVKQMLNSVMQELEDYSEGGPLYKNGSLRNADSEIKHSTPSPTKYSLSPSKSYKYSPETPPRWTEDRNSLLNMICQQVEAIKKEMQELKLNSSKSASRHRWPTENYGPDSVPDGYQGSQTFHGAPLTVATTGPSVYYSQSPAYNSQYLLRPAANVTPTKGSSNTEFKSTKEGFSIPVSADGFKFGISEPGNQEKKREKPLENDTGLQAQDIRGRKKGRGVIFGQTSSTFTFADVAKSTSGEGFQFGKKDLNFKGFSGAGEKLFSSRYGKMANKANTSGDFEKDDDAYKTEDSDDIHFEPVVQMPEKVELVTGEEGEKVLYSQGVKLFRFDAEVRQWKERGLGNLKILKNEVNGKLRMLMRREQVLKVCANHWITTTMNLKPLSGSDRAWMWSASDFSDGDAKLERLAAKFKTPELAEEFKQKFEECQRLLLDIPLQTPHKLVDTGRAAKLIQRAEEMKSGLKDFKTFLTNDQTKVTEEENKGSGTGVAGASDTTIKPNAENTGPTLEWDNYDLREDALDDSVSSSSVHASPLASSPVRKNLFRFDESTTGSNFSFKSALSLSKSPAKLNQSGTSVGTDEESVVTQEEERDGQYFEPVVPLPDLVEVSSGEENEQVVFSHRAEIYRYDKDVGQWKERGIGDIKILQNYDNKQVRIVMRRDQVLKLCANHRITPDMSLQNMKGTERVWVWTACDFADGERKVEHLAVRFKLQDVADSFKKIFDEAKTAQEKDSLITPHVSRSSTPRESPCGKIAVAVLEEITRERTDVIQGDDVADAASEVEVSSTSETTTKAVVSPPKFVFVSESVKRIFSSEKSKPFAFGNSSATGSLFGFSFNAPLKSNNSETSSVAQSGSESKVEPKKCELSKNSDIEQSSDSKVKNLSASFPTEESSINYTFKTPEKEPPLWHAEFTKEELVQKLRSTTKSADHLNGLLREIEATNAVLMEQIKLLKSEIRRLERNQEREKSAANLEYLKNVLLQFIFLKPGSERERLLPVINTMLQLSPEEKGKLAAVAQDEEENPSRSSG

SEQ ID NO: 99507 - protein, 174 aa, Homo sapiens; identical to SEQ ID NO: 47355

SEQ ID NO: 99508 - protein, 3207 aa, Homo sapiens
QMRQKSKQQAKIEATQKLEQVKNEQQQQQQQQFGSQHLLVQSGSDTPSSGIQSPLTPQPGNGNMSPAQSFHKELFTKQPPSTPTSTSSDDVFVKPQAPPPPPAPSRIPIQDSLSQAQTSQPPSPQVFSPGSSNSRPPSPMDPYAKMVGTPRPPPVGHSFSRRNSAAPVENCTPLSSVSRPLQMNETTANRPSPVRDLCSSSTTNNDPYAKPPDTPRPVMTDQFPKSLGLSRSPVVSEQTAKGPIAAGTSDHFTKPSPRADVFQRQRIPDSYARPLLTPAPLDSGPGPFKTPMQPPPSSQDPYGSVSQASRRLSVDPYERPALTPRPIDNFSHNQSNDPYSQPPLTPHPAVNESFAHPSRAFSQPGTISRPTSQDPYSQPPGTPRPVVDSYSQSSGTARSNTDPYSQPPGTPRPTTVDPYSQQPQTPRPSTQTDLFVTPVTNQRHSDPYAHPPGTPRPGISVPYSQPPATPRPRISEGFTRSSMTRPVLMPNQDPFLQAAQNRGPALPGPLVRPPDTCSQTPRPPGPGLSDTFSRVSPSAARDPYDQSPMTPRSQSDSFGTSQTAHDVADQPRPGSEGSFCASSNSPMHSQGQQFSGVSQLPGPVPTSGVTDTQNTVNMAQADTEKLRQRQKLREIILQQQQQKKIAGRQEKGSQDSPAVPHPGPLQHWQPENVNQAFTRPPPPYPGNIRSPVAPPLGPRYAVFPKDQRGPYPPDVASMGMRPHGFRFGFPGGSHGTMPSQERFLVPPQQIQGSGVSPQLRRSVSVDMPRPLNNSQMNNPVGLPQHFSPQSLPVQQHNILGQAYIELRHRAPDGRQRLPFSAPPGSVVEASSNLRHGNFIPRPDFPGPRHTDPMRRPPQGLPNQLPVHPDLEQVPPSQQEQGHSVHSSSMVMRTLNHPLGGEFSEAPLSTSVPSETTSDNLQITTQPSDGLEEKLDSDDPSVKELDVKDLEGVEVKDLDDEDLENLNLDTEDGKVVELDTLDNLETNDPNLDDLLRSGEFDIIAYTDPELDMGDKKSMFNEELDLPIDDKLDNQCVSVEPKKKEQENKTLVLSDKHSPQKKSTVTNEVKTEVLSPNSKVESKCETEKNDENKDNVDTPCSQASAHSDLNDGEKTSLHPCDPDLFEKRTNRETAGPSANVIQASTQLPAQDVINSCGITGSTPVLSSLLANEKSDNSDIRPSGSPPPPTLPASPSNHVSSLPPFIAPPGRVLDNAMNSNVTVVSRVNHVFSQGVQVNPGLIPGQSTVNHSLGTGKPATQTGPQTSQSGTSSMSGPQQLMIPQTLAQQNRERPLLLEEQPLLLQDLLDQERQEQQQQRQMQAMIRQRSEPFFPNIDFDAITDPIMKAKMVALKGINKVMAQNNLGMPPMVMSRFPFMGQVVTGTQNSEGQNLGPQAIPQDGSITHQISRPNPPNFGPGFVNDSQRKQYEEWLQETQQLLQMQQKYLEEQIGAHRKSKKALSAKQRTAKKAGREFPEEDAEQLKHVTEQQSMVQKQLEQIRKQQKEHAELIEDYRIKQQQQCAMAPPTMMPSVQPQPPLIPGATPPTMSQPTFPMVPQQLQHQQHTTVISGHTSPVRMPSLPGWQPNSAPAHLPLNPPRIQPPIAQLPIKTCTPAPGTVSNANPQSGPPPRVEFDDNNPFSESFQERERKERLREQQERQRIQLMQEVDRQRALQQRMEMEQHGMVGSEISSSRTSVSQIPFYSSDLPCDFMQPLGPLQQSPQHQQQMGQVLQQQNIQQGSINSPSTQTFMQTNERRQVGPPSFVPDSPSIPVGSPNFSSVKQGHGNLSGTSFQQSPVRPSFTPALPAAPPVANSSLPCGQDSTITHGHSYPGSTQSLIQLYSDIIPEEKGKKKRTRKKKRDDDAESTKAPSTPHSDITAPPTPGISETTSTPAVSTPSELPQQADQESVEPVGPSTPNMAAGQLCTELENKLPNSDFSQATPNQQTYANSEVDKLSMETPAKTEEIKLEKAETESCPGQEEPKLEEQNGSKVEGNAVACPVSSAQSPPHSAGAPAAKGDSGNELLKHLLKNKKSSSLLNQKPEGSICSEDDCTKDNKLVEKQNPAEGLQTLGAQMQGGFGCGNQLPKTDGGSETKKQRSKRTQRTGEKAAPRSKKRKKDEEEKQAMYSSTDTFTHLKQQLSLLPLMEPIIGVNFAHFLPYGSGQFNSGNRLLGTFGSATLEGVSDYYSQLIYKQNNLSNPPTPPASLPPTPPPMACQKMANGFATTEELAGKAGVLVSHEVTKTLGPKPFQLPFRPQDDLLARALAQGPKTVDVPASLPTPPHNNQEELRIQDHCGDRDTPDSFVPSSSPESVVGVEVSRYPDLSLVKEEPPEPVPSPIIPILPSTAGKSSESRRNDIKTEPGTLYFASPFGPSPNGPRSGLISVAITLHPTAAENISSVVAAFSDLLHVRIPNSYEVSSAPDVPSMGLVSSHRINPGLEYRQHLLLRGPPPGSANPPRLVSSYRLKQPNVPFPPTSNGLSGYKDSSHGIAESAALRPQWCCHCKVVILGSGVRKSFKDLTLLNKDSRESTKRVEKDIVFCSNNCFILYSSTAQAKNSENKESIPSLPQSPMRETPSKAFHQYSNNISTLDVHCLPQLPEKASPPASPPIAFPPAFEAAQVEAKPDELKVTVKLKPRLRAVHGGFEDCRPLNKKWRGMKWKKWSIHIVIPKGTFKPPCEDEIDEFLKKLGTSLKPDPVPKDYRKCCFCHEEGDGLTDGPARLLNLDLDLWVHLNCALWSTEVYETQAGALINVELALRRGLQMKCVFCHKTGATSGCHRFRCTNIYHFTCAIKAQCMFFKDKTMLCPMHKPKGIHEQELSYFAVFRRVYVQRDEVRQIASIVQRGERDHTFRVGSLIFHTIGQLLPQQMQAFHSPKALFPVGYEASRLYWSTRYANRRCRYLCSIEEKDGRPVFVIRIVEQGHEDLVLSDISPKGVWDKILEPVACVRKKSEMLQLFPAYLKGEDLFGLTVSAVARIAESLPGVEACENYTFRYGRNPLMELPLAVNPTGCARSEPKMSAHVKRPHTLNSTSTSKSFQSTVTGELNAPYSKQFVHSKSSQYRKMKTEWKSNVYLARSRIQGLGLYAARDIEKHTMVIEYIGTIIRNEVANRKEKLYESQNRGVYMFRMDNDHVIDATLTGGPARYINHSCAPNCVAEVVTFERGHKIIISSSRRIQKGEELCYDYKFDFEDDQHKIPCHCGAVNCRKWMN

SEQ ID NO: 99509 - protein, 139 aa, Homo sapiens
TQPTGQIKIKREDYESLPKEVASAKPKVLLDVKLKAEDFIVDVINMDYGMQEKNPIDHVSFYCKTAPNRAIRITKNQVSQLLPEKFAEQLIRVYCKKVDRKSLYAARQYFVQWCADRNFTKPQVGGLLLTNFAQFFIFK

SEQ ID NO: 99510 - protein, 105 aa, Homo sapiens
MAQGVLWILLGLLLWSDPGTASLPLLMDSVIQALAELEQKVPAAKTRHTASAWLMSAPNSGPHNRLYHFLLGAWSLNATELDPCPLSPELLGLTKEVARHDVREG

SEQ ID NO: 99511 - protein, 1076 aa, Homo sapiens
MLQQVPENINFPAEEEKILEFWTEFNCFQECLKQSKHKPKFTFYDGPPFATGLPHYGHILAGTIKDIVTRYAHQSGFHVDRRFGWDCHGLPVEYEIDKTLGIRGPEDVAKMGITEYNNQCRAIVMRYSAEWKSTVSRLGRWIDFDNDYKTLYPQFMESVWWVFKQLYDKGLVYRGVKVMPFSTACNTPLSNFESHQNYKDVQDPSVFVTFPLEEDETVSLVAWTTTPWTLPSNLAVCVNPEMQYVKIKDVARGRLLILMEARLSALYKLESDYEILERFPGAYLKGKKYRPLFDYFLKCKENGAFTVLVDNYVKEEEGTGVVHQAPYFGAEDYRVCMDFNIIRKDSLPVCPVDASGCFTTEVTDFAGQYVKDADKSIIRTLKEQGRLLVATTFTHSYPFCWRSDTPLIYKAVPSWFVRVENMVDQLLRNNDLCYWVPELVREKRFGNWLKDARDWTISRNRYWGTPIPLWVSDDFEEVVCIGSVAELEELSGAKISDLHRESVDHLTIPSRCGKGSLHRISEVFDCWFESGSMPYAQVHYPFENKREFEDAFPADFIAEGIDQTRGWFYTLLVLATALFGQPPFKNVIVNGLVLASDGQKMSKRKKNYPDPVSIIQKYGADALRLYLINSPVVRAENLRFKEEGVRDVLKDVLLPWYNAYRFLIQNVLRLQKEEEIEFLYNENTVRESPNITDRWILSFMQSLIGFFETEMAAYRLYTVVPRLVKFVDILTNWYVRMNRRRLKGENGMEDCVMALETLFSVLLSLCRLMAPYTPFLTELMYQNLKVLIDPVSVQDKDTLSIHYLMLPRVREELIDKKTESAVSQMQSVIELGRVIRDRKTIPIKYPLKEIVVIHQDPEALKDIKSLEKYIIEELNVRKVTLSTDKNKYGIRLRAEPDHMVLGKRLKGAFKAVMTSIKQLSSEELEQFQKTGTIVVEGHELHDEDIRLMYTFDQATGGTAQFEAHSDAQALVLLDVTPDQSMVDEGMAREVINRIQKLRKKCNLVPTDEITVYYKAKSEGTYLNSVIESHTEFIFTTIKAPLKPYPVSPSDKVLIQEKTQVEYCSWKIQKVTIGWTF

SEQ ID NO: 99512 - protein, 46 aa, Homo sapiens
MASEVGHNLESPETPGGGGWTRVEFPPPAPKGAATVWCLNRLGCHH

SEQ ID NO: 99513 - protein, 56 aa, Homo sapiens
FIIFMAVSICCIKKLQREKKILSGEKKVEQEEKEIAQQLQEELRWRRTFLHAGECL

SEQ ID NO: 99514 - protein, 664 aa, Homo sapiens
MRRLSLSPTFSMGFHLLVTVSLLFSHVDHVIAETEMEGEGNETGECTGSYYCKKGVILPIWEPQDPSFGDKIARATVYFVAMVYMFLGVSIIADRFMSSIEVITSQEKEITIKKPNGETTKTTVRIWNETVSNLTLMALGSSAPEILLSVIEVCGHNFTAGDLGPSTIVGSAAFNMFIIIALCVYVVPDGETRKIKHLRVFFVTAAWSIFAYTWLYIILSVISPGVVEVWEGLLTFFFFPICVVFAWVADRRLLFYKYVYKRYRAGKQRGMIIEHEGDRPSSKTEIEMDGKVVNSHVENFLDGALVLEVDERDQDDEEARREMARILKELKQKHPDKEIEQLIELANYQVLSQQQKSRAFYRIQATRLMTGAGNILKRHAADQARKAVSMHEVNTEVTENDPVSKIFFEQGTYQCLENCGTVALTIIRRGGDLTNTVFVDFRTEDGTANAGSDYEFTEGTVVFKPGDTQKEIRVGIIDDDIFEEDENFLVHLSNVKVSSEASEDGILEANHVSTLACLGSPSTATVTIFDDDHAGIFTFEEPVTHVSESIGIMEVKVLRTSGARGNVIVPYKTIEGTARGGGEDFEDTCGELEFQNDEIVKTISVKVIDDEEYEKNKTFFLEIGEPRLVEMSEKKGRSLPLEYLTVRNMRKSAVSPLCLRNQNG

SEQ ID NO: 99515 - protein, 141 aa, Homo sapiens
MSLKNEPRVNTSALQKIAADMSNIIENLDTRELHFEGEEVDYDVSPSDPKIQEVYIPFSAIYNTQGFKEPNIQTYLSGCPIKAQVLEVERFTSTTRVPSINLYTIELTHGEFKWQVKRKFKHFQEFHRELLKYKAFIRIPI

SEQ ID NO: 99516 - protein, 245 aa, Homo sapiens
MLPLEPCRRPNFELIPLLNSVDSDNCGSMVPSFADILYVANDEEASYLRFRNSIWKNEEEKVEIFHPLRLVRDPLSPAVRQKETVKNDLPVNEAAIRKIAALENELTFLRSQIAAIVEMQELKNSTNSSSFGLSDERISLGQLSSSRAAHLSVDPDQLPGSVLSPPPPPPLPPQFSSLQPPCFPPVQPGSNNICDSDNPATEMSKQNPAANKTNYSHHSKSQRNKDIPNMLDVLKDMNKVKLRAI

SEQ ID NO: 99517 - protein, 42 aa, Homo sapiens
MVPGVAGSAAAAGEGGGVAGFLSLTSNAIQLPISSKANISQF

SEQ ID NO: 99518 - protein, 123 aa, Homo sapiens
MGSGASAEDKELAKRSKELEKKLQEDADKEAKTVKLLLLGAGESGKSTIVKQMKIIHQDGYSPEECLEFKAIIYGNVLQSILAIIRAMTTLGIDYAEPSCADDGRQLNNLADSIEEGTMPPEL

SEQ ID NO: 99519 - protein, 175 aa, Homo sapiens
MQARRAHRQRNASRDQVVYGSGTKTDRWARLLRRSKEKTKEGLRSLQPWAWTLKRIGGQFGAGTESYFSLLRFLLLLNVLASVLMACMTLLPTWLGGAPPGPPGPDISSPCGSYNPHSQGLVTFATQLFNLLSGEGYLEWSPLFYGFYPPRPRLAVTYLCWAFAVGLICLLLILH

SEQ ID NO: 99520 - protein, 1682 aa, Homo sapiens
MVDKNIYIIQGEINIVVGAIKRNARWSTHTPLDEERDPLLHSFGHLKEVLNSITELSEIEPNVFLRPFLEVIRSEDTTGPITGLALTSVNKFLSYALIDPTHEGTAEGMENMADAVTHARFVGTDPASDEVVLMKILQVLRTLLLTPVGAHLTNESVCEIMQSCFRICFEMRLSELLRKSAEHTLVDMVQLLFTRLPQFKEEPKNYVGTNMKKLKMRAGGMSDSSKWKKQKRSPRPPRHMTKVTPGSELPTPNGTTLSSNLTGGMPFIDVPTPISSASSEAASAVVSPSTDSGLEFSSQTTSKEDLTDLEQPGSPGYSTATEPGSSELGVPEQPDLQEGTHVEKSQSASVESIPEVLEECTSPADHSDSASVHDMDYVNPRGVRFTQSSQKEGTALVPYGLPCIRELFRFLISLTNPHDRHNSEVMIHMGLHLLTVALESAPVAQCQTLLGLIKDEMCRHLFQLLSIERLNLYAASLRVCFLLFESMREHLKFQMEMYIKKLMEIITVENPKMPYEMKEMALEAIVQLWRIPSFVTELYINYDCDYYCSNLFEELTKLLSKNAFPVSGQLYTTHLLSLDALLTVIDSTEAHCQAKVLNSLTQQEKKETARPSCEIVDGTREASNTERTASDGKAVGMASDIPGLHLPGGGRLPPEHGKSGCSDLEEAVDSGADKKFARKPPRFSCLLPDPRELIEIKNKKKLLITGTEQFNQKPKKGIQFLQEKGLLTIPMDNTEVAQWLRENPRLDKKMIGEFVSDRKNIDLLESFVSTFSFQGLRLDEALRLYLEAFRLPGEAPVIQRLLEAFTERWMNCNGSPFANSDACFSLAYAVIMLNTDQHNHNVRKQNAPMTLEEFRKNLKGVNGGKDFEQDILEDMYHAIKNEEIVMPEEQTGLVRENYVWNVLLHRGATPEGIFLRVPTASYDLDLFTMTWGPTIAALSYVFDKSLEETIIQKAISGFRKCAMISAHYGLSDVFDNLIISLCKFTALSSESIENLPSVFGSNPKAHIAAKTVFHLAHRHGDILREGWKNIMEAMLQLFRAQLLPKAMIEVEDFVDPNGKISLQREETPSNRGESTVLSFVSWLTLSGPEQSSVRGPSTENQEAKRVALECIKQCDPEKMITESKFLQLESLQELMKALVSVTPDEETYDEEDAAFCLEMLLRIVLENRDRVGCVWQTVRDHLYHLCVQAQDFCFLVERAVVGLLRLAIRLLRREEISAQVLLSLRILLLMKPSVLSRVSHQVAYGLHELLKTNAANIHSGDDWATLFTLLECIGSGVKPPAALQATARADAPDAGAQSDSELPSYHQNDVSLDRGYTSDSEVYTDHGRPGKIHRSATDADVVNSGWLVVGKDDVDNSKPGPSRPGPSPLINQYSLTVGLDLGPHDTKSLLKCVESLSFIVRDAAHITPDNFELCVKTLRIFVEASLNGGCKSQEKRGKSHKYDSKGNRFKKKSKEGSMLRRPRTSSQHASRGGQSDDDEDEGVPASYHTVSLQVSQDLLDLMHTLHTRAASIYSSWAEEQRHLETGGQKIEADSRTLWAHCWCPLLQGIACLCCDARRQVRMQALTYLQRALLVHDLQKLDALEWESCFNKVLFPLLTKLLENISPADVGGMEETRMRASTLLSKVFLQHLSPLLSLSTFAALWLTILDFMDKYMHAGSSDLLCRCTGRRPLGPLGDHLGTH

SEQ ID NO: 99521 - protein, 2645 aa, Homo sapiens
MSIYDINREQDYVKNSEGILGENELRPPSQLHSLLEKIETGSLSEKIFETVSLSSDSLFQRAVSLLHTSYLDSSSEHGFQYSQVTLVKNDIFLNEYKTFYQQKKASSYTQEELQDTYGFLLFDTEKQAKLVCQCGLRVGSSAVTTLGDPAKGVYISKYSDCLHSRPWYHGKSGYVVIFNIIKYYFYELSGNTVIERPRQICPYVIVAFRYRESKTMAPPAHKSILERSENVLMSPWKGKLIVQDRMLCDIALWSTYGAMIPTQLPQELDFKYVMKVSSLKKRLPEAAFRKQNYLEEKVCFQDLCFNLYEVELSNRQGENIDKLTECIKNKQLAIIKCLEDRGFFILLTSSALLSEPDFGGKQMGLHGLHLFRSPLSTGVKDLKVEDDISMKVIPILSTLNCALLETKKSLPEERIHPNTLVKRHFQELYKADRSPSLSVAPQDRMKDPTFLGKLPSGFDLIPPAEKCPSESLTQLNSYFSDPSAYILEVSTALDLLAEHPQSPCVSDGICDAGFSLVMTPDPEFLVSEAEVRKETETKKDSEEMLKAKKRVFPLSPASNLRVQPKRKASMPHMVQSKKVNLCRPFPKRTASRADNSSDSPTTLKLVKGQFPQKRKRGAEVLTAQFVQKTKLDRKNQEAPISKDVPVPTNAKRARKQEKSPVKTVPRAKPPVKKSPQKQRVNIVKGNENPRNRKQLQPVKGETASKLQSEISRGCQEDGISINSVQPENTTAAHNDLPENSIVNYDSQALNMLADLALSSATSSTPVSEARNLHCSSELPQNDVLLSKENSLRGTSDHEYHRGVKTQKGELLPNPSSDRKSNSGSDLTVSQDEESLVPCSQAPAKAQSALTEEMLESSDASQSSSVSVEHSYALLLTEHSKKHLQEREILSPLFPRNGTKSPEAATPVGKVMPFRHQPGLLLQQKPPDDPVVKPKDRPPSARVKKSSCSRIVLSCDDSVKITFKCETEYAFSLDSKYTNNPLEKTVVRALHGPWNTDLPDNVEEVKLLLHMWVALFYSNQNKIIRSSRKVVEHSNPAKYVSINSTLESCELREIEESLGLEKCSADSLLETNEISRAHAAEVSFRDPNCLLPFIKTPLTQGLELCVQNEQKKTFARECDPDTQEDQNFICSYNNEVTGEEAKQESLETSNLVLSGIGSTQTNGPSVPSEEEIVQPLDSTRVASYSGTVTQATFTRTYDGPGSQPVICQSSVYGTLENKVDILDAAVQTKTGTLQDLIQHGSPINNECHPSLERKDDNMGCAVINPEPITLTFEKNAHVPIQTEGVNTADERTTFKKELIKQVSPAASLRHPVSTSENARTQGLRDIPSLVVAGQKGTKYLCASSVGGETLDKAVCSLQKETPLPVSLPSDKTMVMEALSLAKSSSHLSPSEEVRCTQDFLSQTQSLLGLSSEGLLELTQVEVDSSSASTTLGRQCSLNCISSGCHTSGDSLELRKNHKNGPNTENMNLEAFDSVFIKQTSLSVSREVSLELSEEDSDIDLALTISPPTSPREEMPAGEIEQFEEAPFSNLELQDVAEEIGEPEEVALTESREVSSADNVSVYPSVSEEPVENKERKGDNLQPVTLILSKENCTLEIAEEINVTSDFPFDSVIEEVSPASSPEPPVPVKETRPYQAVTPCILKLHGTQCEKSNQISQCESEDLGITEKENVFVGPTHPVGQDNFTQVQQMQVSAEMPLILTDHPGRTGRPTLPGKVTEEIVSSEHDEGLSFSGKVQCYGRELNQPASAAKCTGDFSPSPEKLVKSGNPLQPVSIENRNLDLKHLVLESSEPPFGPRNVIENKSLSDTLVSTTAPSGIVNVSVKQQTSPKSSQNHLFPGDLKTDEGIYLQVKSLTAASVDGAYSTQGCMCSVVPTLCSSSDNATLTHYVRPINAEPVFQAQEIPAGRMASLLKNGEPEAELHKETTGPGTAGPQSNTTSSLKGERKAIHTLQDVSTCETKELLNVGVSSLCAGPYQNTADTKENLSKEPLASFVSESFDTSVCGIATEHVEIENSGEGLRAEAGSETLGRDGEVGVNSDMHYELSGDSDLDLLGDCRNPRLDLEDSYTLRGSYTRKKDVPTDGYESSLNFHNNNQEDWGCSSWVPGMETSLPPGHWTAAVKKEEKCVPPYVQIRDLHGILRTYANFSITKELKDTMRTSHGLRRHPSFSANCGLPSSWTSTWQVADDLTQNTLDLEYLRFAHKLKQTIKNGDSQHSASSANVFPKESPTQISIGAFPSTKISEAPFLHPAPRSRSPLLVTVVESDPRPQGQPRRGYTASSLDSSSSWRERCSHNRDLRNSQRNHTVSFHLNKLKYNSTVKESRNDISLILNEYAEFNKVMKNSNQFIFQDKELNDVSGEATAQEMYLPFPGRSASYEDIIIDVCTNLHVKLRSVVKEACKSTFLFYLVETEDKSFFVRTKNLLRKGGHTEIEPQHFCQAFHRENDTLIIIIRNEDISSHLHQIPSLLKLKHFPSVIFAGVDSPGDVLDHTYQELFRAGGFVISDDKILEAVTLVQLKEIIKILEKLNGNGRWKWLLHYRENKKLKEDERVDSTAHKKNIMLKSFQSANIIELLHYHQCDSRSSTKAEILKCLLNLQIQHIDARFAVLLTDKPTIPREVFENSGILVTDVNNFIENIEKIAAPFRSSYW

SEQ ID NO: 99522 - protein, 203 aa, Homo sapiens
MALWCKRGVTSSRRLLKDLEQKMMATPNQTACNAESPVALEEAKTSGAPGSPQTPPERHDSGGSLPLTPRMESHSEDEDLAGAVGGLGWNSRSPRTQSPGGCSAEAVLARKKHRRRPSKRKRHWRPYLELSWAEKQQRDERQSQRASRVREEMFAKGQPVAPYNTTQFLMNDRDPEEPNLDVPHGISHPGSSGESEAGDSDGR

SEQ ID NO: 99523 - protein, 60 aa, Homo sapiens
MVLLSTLGIVFQGEGPPISSCDTGTMANCERTFIAIKPDGVQRGLVGEIIKRFEQKGFRL

SEQ ID NO: 99524 - protein, 161 aa, Homo sapiens
MAFPAGFGWAAATAAYQVEGGWDADGKGPCVWDTFTHQGGERVFKNQTGDVACGSYTLWEEDLKCIKQLGLTHYRFSLSWSRLLPDGTTGFINQKAIQLDKVNLQVYCAWSLLDNFEWNQGYSSRFGLFHVDFEDPARPRVPYTSAKEAKIIRNNGLEAHL

SEQ ID NO: 99525 - protein, 227 aa, Homo sapiens
MGRKKIQITRIMDERNRQVTFTKRKFGLMKKAYELSVLCDCEIALIIFNSTNKLFQYASTDMDKVLLKYTEYNEPHESRTNSDIVEALNKKENKGCESPDPDSSYALTPRTEEKYKKINEEFDNMIKSHKIPAVPPPNFEMPVSIPVSSHNSLVYSNPVSSLGNPNLLPLAHPSLQRNSMSPGVTHRPPSAGNTGGLMGGDLTSGAGTSAGNGYGNPRNSPGLLVSP

SEQ ID NO: 99526 - protein, 263 aa, Homo sapiens
MNEEYDVIVLGTGLTECILSGIMSVNGKKVLHMDRNPYYGGESASITPLEDLYKRFKIPGSPPESMGRGRDWNVDLIPKFLMANEVTRYLDFKVTEGSFVYKGGKIYKVPSTEAEALASSLMGLFEKRRFRKFLVYVANFDEKDPRTFEGIDPKKTTMRDVYKKFDLGQDVIDFTGHALALYRTDDYLDQPCYETINRIKLYSESLARYGKSPYLYPLYGLGELPQGFARLSAIYGGTYMLNKPIEEIIVQNGKVIGVKSEGE

SEQ ID NO: 99527 - protein, 155 aa, Homo sapiens
MASTEEQYDLKIVKVEEDPIWDQETHLRGNNFSGQEASRQLFRQFCYQETPGPREALSRLRELCHQWLRPEIHTKEQILELLVLEQFLTILPEELQAWVREHHPESGEEAVAVVEDLEQELSEPGNQAPDHEHGHSEVLLEDVEHLKVKQEPTDI

SEQ ID NO: 99528 - protein, 81 aa, Homo sapiens
MADGNQAQLAMSHLNGHKLHGKPIRITLSKHQNVQLPREGQEDQGLTKDYGNSPLHRFKKPGSKNFQNIFPPSATLHLSNI

SEQ ID NO: 99529 - protein, 136 aa, Homo sapiens
MPKKFQGENTKSAAARARRAEAKAAADAKKQKELEDAYWKDDDKHVMRKEQRKEEKEKRRLDQLERKKETQRLLEEEDSKLKGGKAPRVATSSKVTRAQIEDTLRRDHQLREAPDTAEKAKSHLEVPLEENVNRRV

SEQ ID NO: 99530 - protein, 320 aa, Homo sapiens
MNPPSQEIEELPRRRCCRRGTQIVLLGLVTAALWAGLLTLLLLWHWDTTQSLKQLEERAARNVSQVSKNLESHHGDQMAQKSQSTQISQELEELRAEQQRLKSQDLELSWNLNGLQADLSSFKSQELNERNEASDLLERLREEVTKLRMELQVSSGFVCNTCPEKWINFQRKCYYFGKGTKQWVHARYACDDMEGQLVSIHSPEEQDFLTKHASHTGSWIGLRNLDLKGEFIWVDGSHVDYSNWAPGEPTSRSQGEDCVMMRGSGRWNDAFCDRKLGAWVCDRLATCTPPASEGSAESMGPDSRPDPDGRLPTPSAPLHS

SEQ ID NO: 99531 - protein, 81 aa, Homo sapiens
MELKLMMEKLGAPQTHLGLKSMIKEVDEDFDGKLSFREFLLIFHKAAAGELQEDSGLMALAKLSEIDVALEGVKGAKNFFE

SEQ ID NO: 99532 - protein, 113 aa, Homo sapiens
  MOD_RES (1)..(1): Any amino acid
XDSALELALHAGKLPFPPEQGDELPELDNMADNWLGSIARATMQTYCDAILQIPELSPHSAKQLATDIGGSPQDRRWEGQLLPAASVSFSFALQESHPKSSLSFSCGFGSEAG

SEQ ID NO: 99533 - protein, 109 aa, Homo sapiens
  MOD_RES (1)..(1): Any amino acid
XDMADYSAALDPAYTTLEFENVQTRPHQKAPTSTRPTAWVSAPCVPSAGTGPRANTTVPRAVTAARASSGGACGRTTCTPADLAGSAWWTKTRGTSAATAGSRNASGLA

SEQ ID NO: 99534 - protein, 13 aa, Homo sapiens
MDNRQNRWSFTMV

SEQ ID NO: 99535 - protein, 2079 aa, Homo sapiens
FMQHPKNFGLIASFLERKTVAECVLYYYLTKKNENYKSLVRRSYRRRGKSQQQQQQQQQQQQQQQQQPMPRSSQEEKDEKEKEKEAEKEEEKPEVENDKEDLLKEKTDDTSGEDNDEKEAVASKGRKTANSQGRRKGRITRSMANEANSEEAITPQQSAELASMELNESSRWTEEEMETAKKGLLEHGRNWSAIARMVGSKTVSQCKNFYFNYKKRQNLDEILQQHKLKMEKERNARRKKKKAPAAASEEAAFPPVVEDEEMEASGVSGNEEEMVEEAEALHASGNEVPRGECSGPATVNNSSDTESIPSPHTEAAKDTGQNGPKPPATLGADGPPPGPPTPPPEDIPAPTEPTPASEATGAPTPPPAPPSPSAPPPVVPKEEKEEETAAAPPVEEGEEQKPPAAEELAVDTGKAEEPVKSECTEEAEEGPAKGKDAEAAEATAEGALKAEKKEGGSGRATTAKSSGAPQDSDSSATCSADEVDEAEGGDKNRLLSPRPSLLTPTGDPRANASPQKPLDLKQLKQRAAAIPPIQVTKVHEPPREDAAPTKPAPPAPPPPQNLQPESDAPQQPGSSPRGKSRSPAPPADKEAEKPVFFPAFAAEAQKLPGDPPCWTSGLPFPVPPREVIKASPHAPDPSAFSYAPPGHPLPLGLHDTARPVLPRPPTISNPPPLISSAKHPSVLERQIGAISQGMSVQLHVPYSEHAKAPVGPVTMGLPLPMDPKKLAPFSGVKQEQLSPRGQAGPPESLGVPTAQEASVLRGTALGSVPGGSITKGIPSTRVPSDSAITYRGSITHGTPADVLYKGTITRIIGEDSPSRLDRGREDSLPKGHVIYEGKKGHVLSYEGGMSVTQCSKEDGRSSSGPPHETAAPKRTYDMMEGRVGRAISSASIEGLMGRAIPPERHSPHHLKEQHHIRGSITQGIPRSYVEAQEDYLRREAKLLKREGTPPPPPPSRDLTEAYKTQALGPLKLKPAHEGLVATVKEAGRSIHEIPREELRHTPELPLAPRPLKEGSITQGTPLKYDTGASTTGSKKHDVRSLIGSPGRTFPPVHPLDVMADARALERACYEESLKSRPGTASSSGGSIARGAPVIVPELGKPRQSPLTYEDHGAPFAGHLPRGSPVTTREPTPRLQEGSLSSSKASQDRKLTSTPREIAKSPHSTVPEHHPHPISPYEHLLRGVSGVDLYRSHIPLAFDPTSIPRGIPLDAAAAYYLPRHLAPNPTYPHLYPPYLIRGYPDTAALENRQTIINDYITSQQMHHNAATAMAQRADMLRGLSPRESSLALNYAAGPRGIIDLSQVPHLPVLVPPTPGTPATAMDRLAYLPTAPQPFSSRHSSSPLSPGGPTHLTKPTTTSSSERERDRDRERDRDREREKSILTSTTTVEHAPIWRPGTEQSSGSSGGGGGSSSRPASHSHAHQHSPISPRTQDALQQRPSVLHNTGMKGIITAVEPSTPTVLRSTSTSSPVRPAATFPPATHCPLGGTLDGVYPTLMEPVLLPKEAPRVARPERPRADTGHAFLAKPPARSGLEPASSPSKGSEPRPLVPPVSGHATIARTPAKNLAPHHASPDPPAPPASASDPHREKTQSKPFSIQELELRSLGYHGSSYSPEGVEPVSPVSSPSLTHDKGLPKHLEELDKSHLEGELRPKQPGPVKLGGEAAHLPHLRPLPESQPSSSPLLQTAPGVKGHQRVVTLAQHISEVITQDYTRHHPQQLSAPLPAPLYSFPGASCPVLDLRRPPSDLYLPPPDHGAPARGSPHSEGGKRSPEPNKTSVLGGGEDGIEPVSPPEGMTEPGHSRSAVYPLLYRDGEQTEPSRMGSKSPGNTSQPPAFFSKLTESNSAMVKSKKQEINKKLNTHNRNEPEYNISQPGTEIFNMPAITGTGLMTYRSQAVQEHASTNMGLEAIIRKALMGKYDQWEESPPLSANAFNPLNASASLPAAMPITAADGRSDHTLTSPGGGGKAKVSGRPSSRKAKSPAPGLASGDRPPSVSSVHSEGDCNRRTPLTNRVWEDRPSSAGSTPFPYNPLIMRLQAGVMASPPPPGLPAGSGPLAGPHHAWDEEPKPLLCSQYETLSDSE

SEQ ID NO: 99536 - protein, 163 aa, Homo sapiens
  MOD_RES (1)..(1): Any amino acid
XERAGATSRGGQAPGFLLRLHTEGRAEAARVQEQDLRQWGLTGIHLRSYQLEGVNWLAQRFHCQNGCILGDEMGLGKTCQTIALFIYLAGRLNDEGPFLILCPLSVLSNWKEEMQRFAPGLSCVTYAGDKEERACLQQDLKQESRFHVLLTTYEIPLECSCCG

SEQ ID NO: 99537 - protein, 537 aa, Homo sapiens
MALLARILRAGLRPAPERGGLLGGGAPRRPQPAGARLPAGARAEDKGAGRPGSPPGGGRAEGPRSLAAMPGPRTLANLAEFFCRDGFSRIHEIQQKHTREYGKIFKSHFGPQFVVSIADRDMVAQVLRAEGAAPQRANMESWREYRDLRGRATGLISAEGEQWLKMRSVLRQRILKPKDVAIYSGEVNQVIADLIKRIYLLRSQAEDGETVTNVNDLFFKYSMEGVATILYESRLGCLENSIPQLTVEYIEALELMFSMFKTSMYAGAIPRWLRPFIPKPWREFCRSWDGLFKFSQIHVDNKLRDIQYQMDRGRRVSGGLLTYLFLSQALTLQEIYANVTEMLLAGVDTTSFTLSWTVYLLARHPEVQQTVYREIVKNLGERHVPTAADVPKVPLVRALLKETLRLFPVLPGNGRVTQEDLVIGGYLIPKGTQLALCHYATSYQDENFPRAKEFRPERWLRKGDLDRVDNFGSIPFGHGVRSCIGRRIAELEIHLVVIQLLQHFEIKTSSQTNAVHAKTHGLLTPGGPIHVRFVNRK

SEQ ID NO: 99538 - protein, 795 aa, Homo sapiens
MNQATSFIGLLSPARLYAIAAKEKDIQEESTFSSRKISNQFDWALMRLDLSVRRTGRIPKKLLQKVFNDTCRSGGLGGSHALLLLRSCGSLLPELKLEERTEFAHRIWDTLQKLGAVYDVSHYNALLKVYLQNEYKFSPTDFLAKMEEANIQPNRVTYQRLIASYCNVGDIEGASKILGFMKTKDLPVTEAVFSALVTGHARAGDMENAENILTVMRDAGIEPGPDTYLALLNAYAEKGDIDHVKQTLEKVEKSELHLMDRDLLQIIFSFSKAGYPQYVSEILEKVTCERRYIPDAMNLILLLVTEKLEDVALQILLACPVSKEDGPSVFGSFFLQHCVTMNTPVEKLTDYCKKLKEVQMHSFPLQFTLHCALLANKTDLAKALMKAVKEEGFPIRPHYFWPLLVGRRKEKNVQGIIEILKGMQELGVHPDQETYTDYVIPCFDSVNSARAILQENGCLSDSDMFSQAGLRSEAANGNLDFVLSFLKSNTLPISLQSIRSSLLLGFRRSMNINLWSEITELLYKDGRYCQEPRGPTEAVGYFLYNLIDSMSDSEVQAKEEHLRQYFHQLEKMNVKIPENIYRGIRNLLESYHVPELIKDAHLLVESKNLDFQKTVQLTSSELESTLETLKAENQPIRDVLKQLILVLCSEENMQKALELKAKYESDMVTGGYAALINLCCRHDKVEDALNLKEEFDRLDSSAVLDTGKYVGLVRVLAKHGKLQDAINILKEMKEKDVLIKDTTALSFFHMLNGAALRGEIETVKQLHEAIVTLGLAEPSTNISFPLVTVHLEKES

SEQ ID NO: 99539 - protein, 163 aa, Homo sapiens
MFGVTKFGDNIEDEWFIVYVIKQITKEFPELVARIEDNDGEFLLIEAADFLPKWLDPENSTNRVFFCHGELCIIPAPRKSGAESWLPTTPPTIPQALNIITAHSEKILASESIRAAVNRRIRGSHSLNVYMHNWCNKGLCQTGGVDTGCLLHLIPSTEPMNWA

SEQ ID NO: 99540 - protein, 1009 aa, Homo sapiens
MTSPQLEWTLQTLLEQLNEDELKSFKSLLWAFPLEDVLQKTPWSEVEEADGKKLAEILVNTSSENWIRNATVNILEEMNLTELCKMAKAEMMEDGQVQEIDNPELGDAEEDSELAKPGEKEGWRNSMEKQSLVWKNTFWQGDIDNFHDDVTLRNQRFIPFLNPRTPRKLTPYTVVLHGPAGVGKTTLAKKCMLDWTDCNLSPTLRYAFYLSCKELSRMGPCSFAELISKDWPELQDDIPSILAQAQRILFVVDGLDELKVPPGALIQDICGDWEKKKPVPVLLGSLLKRKMLPRAALLVTTRPRALRDLQLLAQQPIYVRVEGFLEEDRRAYFLRHFGDEDQAMRAFELMRSNAALFQLGSAPAVCWIVCTTLKLQMEKGEDPVPTCLTRTGLFLRFLCSRFPQGAQLRGALRTLSLLAAQGLWAQMSVFHREDLERLGVQESDLRLFLDGDILRQDRVSKGCYSFIHLSFQQFLTALFYTLEKEEGEDRDGHAWDIGDVQKLLSGEERLKNPDLIQVGHFLFGLANEKRAKELEATFGCRMSPDIKQELLQCKAHLHANKPLSVTDLKEVLGCLYESQEEELAKVVVAPFKEISIHLTNTSEVMHCSFSLKHCQDLQKLSLQVAKGVFLENYMDFELDIEFESSNSNLKFLEVKQSFLSDSSVRILCDHVTRSTCHLQKVEIKNVTPDTAYRDFCLAFIGKKTLTHLTLAGHIEWERTMMLMLCDLLRNHKCNLQYLRLGGHCATPEQWAEFFYVLKANQSLKHLRLSANVLLDEGAMLLYKTMTRPKHFLQMLSLENCRLTEASCKDLAAVLVVSKKLTHLCLAKNPIGDTGVKFLCEGLSYPDCKLQTLVLQQCSITKLGCRYLSEALQEACSLTNLDLSINQIARGLWILCQALENPNCNLKHLRLWSCSLMPFYCQHLGSALLSNQKLETLDLGQNHLWKSGIIKLFGVLRQRTGSLKILRLKTYETNLEIKKLLEEVKEKNPKLTIDCNASGATAPPCCDFFC

SEQ ID NO: 99541 - protein, 128 aa, Homo sapiens
MNLCQSPFQEGCQSLLASWPEQAKEPRREGHTDKQQTEDVLAAGLRCLPHLPAICARRMSPAFRAMDVEPRAKGVLLEPFVHQVGGHSCVLRFNETTLCKPLVPREHQFYETLPAEMRKFTPQYKGVS

SEQ ID NO: 99542 - protein, 1860 aa, Homo sapiens
MVDKNIYIIQGEINIVVGAIKRNARWSTHTPLDEERDPLLHSFGHLKEVLNSITELSEIEPNVFLRPFLEVIRSEDTTGPITGLALTSVNKFLSYALIDPTHEGTAEGMENMADAVTHARFVGTDPASDEVVLMKILQVLRTLLLTPVGAHLTNESVCEIMQSCFRICFEMRLSELLRKSAEHTLVDMVQLLFTRLPQFKEEPKNYVGTNMKKLKMRAGGMSDSSKWKKQKRSPRPPRHMTKVTPGSELPTPNGTTLSSNLTGGMPFIDVPTPISSASSEAASAVVSPSTDSGLEFSSQTTSKEDLTDLEQPGSPGYSTATEPGSSELGVPEQPDLQQEGTHVEKSQSASVESIPEVLEECTSPADHSDSASVHDMDYVNPRGVRFTQSSQKEGTALVPYGLPCIRELFRFLISLTNPHDRHNSEVMIHMGLHLLTVALESAPVAQCQTLLGLIKDEMCRHLFQLLSIERLNLYAASLRVCFLLFESMREHLKFQMEMYIKKLMEIITVENPKMPYEMKEMALEAIVQLWRIPSFVTELYINYDCDYYCSNLFEELTKLLSKNAFPVSGQLYTTHLLSLDALLTVIDSTEAHCQAKVLNSLTQQEKKETARPSCEIVDGTREASNTERTASDGKAVGMASDIPGLHLPGGGRLPPEHGKSGCSDLEEAVDSGADKKFARKPPRFSCLLPDPRELIEIKNKKKLLITGTEQFNQKPKKGIQFLQEKGLLTIPMDNTEVAQWLRENPRLDKKMIGEFVSDRKNIDLLESFVSTFSFQGLRLDEALRLYLEAFRLPGEAPVIQRLLEAFTERWMNCNGSPFANSDACFSLAYAVIMLNTDQHNHNVRKQNAPMTLEEFRKNLKGVNGGKDFEQDILEDMYHAIKNEEIVMPEEQTGLVRENYVWNVLLHRGATPEGIFLRVPTASYDLDLFTMTWGPTIAALSYVFDKSLEETIIQKAISGFRKCAMISAHYGLSDVFDNLIISLCKFTALSSESIENLPSVFGSNPKAHIAAKTVFHLAHRHGDILREGWKNIMEAMLQLFRAQLLPKAMIEVEDFVDPNGKISLQREETPSNRGESTVLSFVSWLTLSGPEQSSVRGPSTENQEAKRVALECIKQCDPEKMITESKFLQLESLQELMKALVSVTPDEETYDEEDAAFCLEMLLRIVLENRDRVGCVWQTVRDHLYHLCVQAQDFCFLVERAVVGLLRLAIRLLRREEISAQVLLSLRILLLMKPSVLSRVSHQVAYGLHELLKTNAANIHSGDDWATLFTLLECIGSGVKPPAALQATARADAPDAGAQSDSELPSYHQNDVSLDRGYTSDSEVYTDHGRPGKIHRSATDADVVNSGWLVVGKDDVDNSKPGPSRPGPSPLINQYSLTVGLDLGPHDTKSLLKCVESLSFIVRDAAHITPDNFELCVKTLRIFVEASLNGGCKSQEKRGKSHKYDSKGNRFKKKSKEGSMLRRPRTSSQHASRGGQSDDDEDEGVPASYHTVSLQVSQDLLDLMHTLHTRAASIYSSWAEEQRHLETGGQKIEADSRTLWAHCWCPLLQGIACLCCDARRQVRMQALTYLQRALLVHDLQKLDALEWESCFNKVLFPLLTKLLENISPADVGGMEETRMRASTLLSKVFLQHLSPLLSLSTFAALWLTILDFMDKYMHAGSSDLLSEAIPESLKNMLLVMDTAEIFHSADARGGGPSALWEITWERIDCFLPHLRDELFKQTVIQDPMPMEPQGQKPLASAHLTSAAGDTRTPGHPPPPEIPSELGACDFEKPESPRAASSSSPGSPVASSPSRLSPTPDGPPPLAQPPLILQPLASPLQVGVPPMTLPIILNPALIEATSPVPLLATPRPTDPIPTSEVN

SEQ ID NO: 99543 - protein, 194 aa, Homo sapiens
  MOD_RES (1)..(1): Any amino acid
XFISHRCDGNRNILHACVSVCFPTSNKETKEEEAERSERNTFAERLSAVEAIANAISVVSSNGPGNRAGSSSSRSLRLREMMRRSLRAAGLGRHEAGASSSDHQDPVSPPIAPPSWVPDPPAMDPDGDIDFILAPAVGSLTTAATGTGQGPSTSTIPGPSTEPSVVESKDRKANAHFILKLLCDSVVLQPYLRE

SEQ ID NO: 99544 - protein, 188 aa, Homo sapiens
VYKGRCRNKIVAIKRYRANTYCSKSDVDMFCREVSILCQLNHPCVIQFVGACLNDPSQFAIVTQYISGGSLFSLLHEQKRILDLQSKLIIAVDVAKGMEYLHNLTQPIIHRDLNRSAITSRIWITHSICIWRGAHYFNREECNFRCMLTSAILKESRFLQSLDEDNMTKQPGNLRWMAPEVFTQCTRY

SEQ ID NO: 99545 - protein, 212 aa, Homo sapiens; identical to SEQ ID NO: 53783

SEQ ID NO: 99546 - protein, 702 aa, Homo sapiens
MESLTESGVLWSLLLEQESQLLQWYLKQLGHAPAAAEHRCWHGSEEIPAVLSPTYKQRNEDFRKLFKQLPDTERLIVDYSCALQRDILLQGRLYLSENWICFYSNIFRWETLLTVRLKDICSMTKEKTARLIPNAIQVCTDSEKHFFTSFGARDRTYMMMFRLWQNALLEKPLCPKELWHFVHQCYGNELGLTSDDEDYVPPDDDFNTMGYCEEIPVEENEVNDSSSKSSIETKPDASPQLPKKSITNSTLTSTGSSEAPVSFDGLPLEEEALEGDGSLEKELAIDNIMGEKIEMIAPVNSPSLDFNDNEDIPTELSDSSDTHDEGEVQAFYEDLSGRQYVNEVFNFSVDKLYDLLFTNSPFQRDFMEQRRFSDIIFHPWKKEENGNQSRVILYTITLTNPLAPKTATVRETQTMYKASQESECYVIDAEVLTHDVPYHDYFYTINRYTLTRVARNKSRLRVSTELRYRKQPWGLVKTFIEKNFWSGLEDYFRHLESELAKTESTYLAEMHRQSPKEKASKTTTVRRRKRPHAHLRVPHLEEVMSPVTTPTDEDVGHRIKHVAGSTQTRHIPEDTPNGFHLQSVSKLLLVISCVICFSLVLLVILNMMLFYKLWMLEYTTQTLTAWQGLRLQERLPQSQTEWAQLLESQQKYHDTELQKWREIIKSSVMLLDQMKDSLINLQNGIRSRDYTSESEEKRNRYH

SEQ ID NO: 99547 - protein, 171 aa, Homo sapiens
MAMMVFPREEKLSQDEIVLGTKAVIQGLETLRGEHRALLAPLVAPEAGEAEPGSQERCILLRRSLEAIELGLGEAQVILALSSHLGAVESEKQKLRAQVRRLVQENQWLREELAGTQQKLQRSEQAVAQLEEEKQHLLFMSQIRKLDEDASPNEEKGDVPKDTLDDLFPNE

SEQ ID NO: 99548 - protein, 287 aa, Homo sapiens
MFANLKYVSLGILVFQTTSLVLTMRYSRTLKEEGPRYLSSTAVVVAELLKIMACILLVYKDSKCSLRALNRVLHDEILNKPMETLKLAIPSGIYTLQNNLLYVALSNLDAATYQWPSDSQLDSKELSAGSQFVGLMAVLTACFSSGFAGVYFEKILKETKQSVWIRNIQLGFFGSIFGLMGVYIYDGELVSKNGFFQGYNRLTWIVVVLQALGGLVIAAVIKYADNILKGFATSLSIILSTLISYFWLQDFVPTRVSLCRQAGVLWRDLGLLQPPTPWFKGFSCLSL

SEQ ID NO: 99549 - protein, 485 aa, Homo sapiens
  MOD_RES (1)..(1): Any amino acid
XLQITNVVEANQPVTIQNWCKRGRKQCKTHPHFVIPYRCLVGEFVSDALLVPDKCKFLHQERMDVCETHLHWHTVAKETCSEKSTNLHDYGMLLPCGIDKFRGVEFVCCPLAEESDNVDSADAEEDDSDVWWGGADTDYADGSEDKVVEVAEEEEVAEVEEEEADDDEDDEDGDEVEEEAEEPYEEATERTTSIATTTTTTTESVEEVVREVCSEQAETGPCRAMISRWYFDVTEGKCAPFFYGGCGGNRNNFDTEEYCMAVCGSAIPTTAASTPDAVDKYLETPGDENEHAHFQKAKERLEAKHRERMSQVMREWEEAERQAKNLPKADKKAVIQHFQEKVESLEQEAANERQQLVETHMARVEAMLNDRRRLALENYITALQAVPPRPRHVFNMLKKYVRAEQKDRQHTLKHFEHVRMVDPKKAAQIRSQVMTHLRVIYERMNQSLSLLYNVPAVAEEIQDEVGAVAHACNSSILGGQGGQMT

SEQ ID NO: 99550 - protein, 147 aa, Homo sapiens
MKIFVGNVDGADTTPEELAALFAPYGTVMSCAVMKQFAFVHMRENAGALRAIEALHGHELRPGRALVVEMSRPRPLNTWKIFVGNVSAACTSQELRSLFERRGRVIECDVVKGSCQDGEAVHRKPAPGGYRAGDSLTLRAVWEGAGM

SEQ ID NO: 99551 - protein, 144 aa, Homo sapiens
MPKAPKGKSAGREKKVIHPYSRKAAQITREAHKQEKKEKLKNEKALRLNLVGEKLQWFQNHLDPQKKRYSKKDACELIERYLNRFSSELEQIELHNSIRDRQGRRHCSRETVIKQTMERERQQFEGYGLEIPDILNASNLKTFR

SEQ ID NO: 99552 - protein, 204 aa, Homo sapiens
MLQINQMFSVQLSLGEQTWESEGSSIKKAQQAVANKALTESTLPKPVQKPPKSNVNNNPGSITPTVELNGLAMKRGEPAIYRPLDPKPFPNYRANYNFRGMYNQRYHCPVPKIFYVQLTVGNNEFFGEGKTRQAARHNAAMKALQALQNEPIPERSPQNGESGKDVDDDKDANKSEISLVFEIALKRNMPVSFEVIKESGPPHM

SEQ ID NO: 99553 - protein, 216 aa, Homo sapiens
MGLDLRPHNHLQHYDMLKDMWVSLAPMPTPRYAATSFLRGSKIYVLGGRQSKYAVNAFEVFDIETRSWTKFPNIPYKRAFSSFVTLDNHLYSLGGLRQGRLYRQPKFLRTMDVFDMEQGGWLKMERSFFLKKRRADFVAGSLSGRVIVAGGLGNQPTVLETAEAFHPGKNKWEILPAMPTPRCACSSIVVKNCLLAVGGVNQGLSDAVEALCVSDS

SEQ ID NO: 99554 - protein, 45 aa, Homo sapiens
MGEEGTGGTVHLLCLAASSGVPLFCRSSRGGAPARQQHHPHCSVI

SEQ ID NO: 99555 - protein, 249 aa, Homo sapiens
MALLVRVLRNQTSISQWVPVCSRLIPVSPTQGQGDRALSRTSQLSTTKDSPQPVEEKVGAFTKIIEAMGFTGPLKYSKWKIKIAALRMYTSCVEKTDFEEFFLRCQMPDTFNSWFLITLLHVWMCLVRMKQEGRSGKYMCRIIVHFMWEDVQQRGRVMGVNPYILKKNMILMTNHFYAAILGYDEGILSDDHGLAAALWRTFFNRKCEDPRHLELLVEYVRKQIQYLDSMNGEDLLLTGEVSWRPLVEK

SEQ ID NO: 99556 - protein, 287 aa, Homo sapiens
  MOD_RES (1)..(1): Any amino acid
XHEQVGSMGLVEMLHRSNLLALVGGGSSPKFSEISVLIWDDAREGKDSKEKLVLEFTFTKPVLSVRMRHDKIVIVLKNRIYVYSFPDNPRKLFEFDTRDNPKGLCDLCPSLEKQLLVFPGHKCGSLQLVPGTVVASASQKGTLIRLFDTQSKEKLVELRRGTDPATLYCINFSHDSSFLCASSDKGTVHIFALKDTRLNRRSALARVGKVGPMIGQYVDSQWSLASFTVPAESACICAFGRNTSKNVNSVIAICVDGTFHKYVFTPDGNCNREAFDVYLDICDDDDF

SEQ ID NO: 99557 - protein, 199 aa, Homo sapiens
MSSEQKSQHCKPEEGVEAQEEALGLVGAQAPTTEEQEAAVSSSSPLVPGTLEEVPAAESAGPPQSPQGASALPTTISFTCWRQPNEGSSSQEEEGPSTSPDAESLFREALSNKVDELAHFLLRKYRAKELVTKAEMLERVIKNYKRCFPVIFGKASESLKMIFGIDVKEVDPASNTYTLVTCLGLSYDGLLDWEIRSIL

SEQ ID NO: 99558 - protein, 69 aa, Homo sapiens
MPWLLSAPKLVPAVANVRGLSGCMLCSQRRYSLQPVPERRIPNRYLGQPSPFTHPHLLRPDSNSCWEVG

SEQ ID NO: 99559 - protein, 105 aa, Homo sapiens
MADEIDFTTGDAGASSTYPMQCSALRKNGFVVLKGRPCKIVEMSTSKTGKHGHAKVHLVGIDIFTGKKYEDICPSTHNMDVPNIKRNDYQKLVKFVRILNCQKVN

SEQ ID NO: 99560 - protein, 182 aa, Homo sapiens
DTVVLSLFPCTPEPVNPEPDASVSSPQAGSSLKHSTTLTNRQRGNEVSALPATLDCDNLVNKPDERGFTPLIWASAFGEIETVRFLLEWGADPHILAKERESALSLASTGGYTDIVGLLLERDVDINIYDWNGGTPLLYAVRGNHVKCVEALLETLQPRSSVETKIAEPEALTSPPKPTLAT

SEQ ID NO: 99561 - protein, 279 aa, Homo sapiens
MSLHQFLLEPITCHAWNRDRTQIALSPNNHEVHIYKKNGSQWVKAHELKEHNGHITGIDWAPKSDRIVTCGADRNAYVWSQKDGVWKPTLVILRINRAATFVKWSPLENKFAVGSGARLISVCYFESENDWWVSKHIKKPIRSTVLSLDWHPNNVLLAAGSCDFKCRVFSAYIKEVDEKPASTPWGSKMPFGQLMSEFGGSGTGGWVHGVSFSASGSRLAWVSHDSTVSVADASKSVQVSTLKTEFLPLLSVSFVSENSSCFRAMTAAQCSLTTMTAAA

SEQ ID NO: 99562 - protein, 224 aa, Homo sapiens
  MOD_RES (1)..(1): Any amino acid
XNTDGSFACTCAPGYRPGPRGASCLDVDECSEEDLCQSGICTNTDGSFECICPPGHRAGPDLASCLDVDECRERGPALCGSQRCENSPGSYRCVRDCDPGYHAGPEGTCDDVDECQEYGPEICGAQRCENTPGSYRCTPACDPGYQPTPGGGCQDVNECETLQGVCGAALCENVEGSFLCVCPNSPEEFDPMTGRCVPPRTSAGTFPGSQPQAPASPVLPARPP

SEQ ID NO: 99563 - protein, 115 aa, Homo sapiens
MLAPEGALNIHEKAWNAYPYCRTVITNEYMKEDFLIKIETWHKPDLGTQENVHKLEPEAWKHVEAVYIDIADRSQVLSKDYKAEEDPAKFKSIKTGRGPLGPNWKQELVNQKDCP

SEQ ID NO: 99564 - protein, 113 aa, Homo sapiens
MNIIDIVAIIPYFITLGTELAEKPEDAQQGQQAMSLAILRVIRLERRPLQSQKSKRGRQHLNTSHDCTLGINLVAGMTVQWTRASGPDDRQVCGSSVYKYISSISLSRVPLPS

SEQ ID NO: 99565 - protein, 295 aa, Homo sapiens
MAPFLRIAFNSYELGSLQAEDEANQPFCAVKMKEALSTERGKTLVQKKPTMYPEWKSTFDAHIYEGRVIQIVLMRAAEEPVSEVTVGVSVLAERCKKNNGKAEFWLDLQPQAKVLMSVQYFLEDVDCKQSMRSEDEAKFPTMNRRGAIKQAKIHYIKNHEFIATFFGQPTFCSVCKDFVWGLNKQGYKCRQCNAAIHKKCIDKIIGRCTGTAANSRDTIFQKERFNIDMPHRFKVHNYMSPTFCDHCGSLLWGLVKQGLKCEDCGMNVHHKCREKVANLCGINQKLLAEALNQVT

SEQ ID NO: 99566 - protein, 89 aa, Homo sapiens
MSKRRMSVGQQTWALLCKNCLKKWRMKRQTLLEWLFSFLLVLFLYLFFSNLHQVHDTPQMSSMDLGRVDSFNDTNYVIAFAPESKTTQE

SEQ ID NO: 99567 - protein, 106 aa, Homo sapiens
  MOD_RES (1)..(1): Any amino acid
XGVPDMTWGQRVTAVVTLREGHSLSHRELKEWARLKEHPTKRRENSILNIGRKRNLASGMRALTGRMAARRAAVSSEVSSSDETDNSLKRHKLPRLTQTLKQTEQF

SEQ ID NO: 99568 - protein, 476 aa, Homo sapiens
MLDERLQRHRTSGGDHAPDSPSGENSPAPQGRLAEVQDSSMPVPAQPKAGGSGSYWPARHSGARVILLVLYREHLNPNGHHFLTKEELLQRCAQKSPRVAPGSARPWPALRSLLHRNLVLRTHQPARYSLTPEGLELAQKLAESEGLSLLNVGIGPKEPPGEETAVPGAASAELASEAGVQQQPLELRPGEYRVLLCVDIGETRGGGHRPELLRELQRLHVTHTVRKLHVGDFVWVAQETNPRDPANPGELVLDHIVERKRLDDLCSSIIDGRFREQKFRLKRCGLERRVYLVEEHGSVHNLSLPESTLLQAVTNTQVIDGFFVKRTADIKESAAYLALLTRGLQRLYQGHTLRSRPWGTPGNPESGAMTSPNPLCSLLTFSDFNAGAIKNKAQSVREVFARQLMQVRGVSGEKAAALVDRYSTPASLLAAYDACATPKEQETLLSTIKCGRLQRNLGPALSRTLSQLYCSYGPLT

SEQ ID NO: 99569 - protein, 226 aa, Homo sapiens
MASPAPPEHAEEGCPAPAAEEQAPPSPPPPQASPAERQQQEEEAQEAGAAEGAGLQVEEAAGRAAAAVTWLLGEPVLWLGCRADELLSWKRPLRSLLGFVAANLLFWFLALTPWRVYHLISVMILGRVIMQIIKDMVLSRTRGAQLWRSLSESWEVINSKPDERPRLSHCIAESWMNFSIFLQEMSLFKQQSPGKCVHIFYDLGKLHSWGYTQLSTVTVCIFVSIV

SEQ ID NO: 99570 - protein, 168 aa, Homo sapiens
MATTVTCTRFTDEYQLYEDIGKGAFSVVRRCVKLCTGHEYAAKIINTKKLSARDHQKLEREARICRLLKHSNIVRLHDSISEEGFHYLVFDLVTGGELFEDIVAREYYSEADARATRTNPPAVCHSHCIQQILEAVLHCHQMGVVHRDLKPENLLLASKCKGAAVKLA

SEQ ID NO: 99571 - protein, 1906 aa, Homo sapiens
MVRERKCILCHIVYSSKKEMDEHMRSMLHHRELENLKGRDISHECRVCGVTEVGLSAYAKHISGQLHKDNVDAQEREDDGKGEEEEEDYFDKELIQLIKQRKEQSRQDEPSNSNQEINSDDRRPQWRREDRIPYQDRESYSQPAWHHRGPPQRDWKWEKDGFNNTRKNSFPHSLRNGGGPRGRSGWHKGVAGGSSTWFHNHSNSGGGWLSNSGAVDWNHNGTGRNSSWLSEGTGGFSSWHMNNSNGNWKSSVRSTNNWNYSGPGDKFQPGRNRNSNCQMEDMTMLWNKKSNKSNKYSHDRYNWQRQENDKLGTVATYRGPSEGFTSDKFPSEGLLDFNFEQLESQTTKQADTATSKVSGKNGSAAREKPRRWTPYPSQKTLDLQSGLKDITGNKSEMIEKPLFDFSLITTGIQEPQTDETRNSPTQKTQKEIHTGSLNHKASSDSAASFEVVRQCPTAEKPEQEHTPNKMPSLKSPLLPCPATKSLSQKQDPKNISKNTKTNFFSPGEHSNPSNKPTVEDNHGPYISKLRSSCPHVLKGNKSTFGSQKQSGDNLNDTLRKAKEVLQCHESLQNPLLSTSKSTRNYAKASRNVEESEKGSLKIEFQVHALEDESDGETSDTEKHGTKIGTLGSATTELLSGSTRTADEKEEDDRILKTSRELSTSPCNPIVRQKESELQMTSAASPHPGLLLDLKTSLEDAQVDDSIKSHVSYETEGFESASLDAELQKSDISQPSGPLLPELSKLGFPASLQRDLTRHISLKSKTGVHLPEPNLNSARRIRNISGHRKSETEKESGLKPTLRQILNASRRNVNWEQVIQQVTKKKQELGKGLPRFGIEMVPLVQNEQEALDLDGEPDLSSLEGFQWEGVSISSSPGLARKRSLSESSVIMDRAPSVYSFFSEEGTGKENEPQQMVSPSNSLRAGQSQKATMHLKQEVTPRAASLRTGERAENVATQRRHSAQLSSDHIIPLMHLAKDLNSQERSIPPSENQNSQESNGEGNCLSSSASSALAISSLADAATDSSCTSGAEQNDGQSIRKKRRATGDGSSPELPSLERKNKRRKIKGKKERSQVDQLLNISLREEELSKSLQCMDNNLLQARAALQTAYVEVQRLLMLKQQITMEMSALRTHRIQILQGLQETYEPSEHPDQVPCSLTRERRNSRSQTSIDAALLPTPFFPLFLEPPSSHVSPSPTGASLQITTSPTFQTHGSVPAPDSSVQIKQEPMSPEQDENVNAVPPSSACNVSKELLEANREISDSCPVYPVITARLSLPESTESFHEPSQELKFSVEQRNTRNRENSPSSQSAGLSSINKEGEEPTKGNSGSEACTSSFLRLSFASETPLEKEPHSPADQPEQQAESTLTSAETRGSKKKKKLRKKKSLRAAHVPENSDTEQDVLTVKPVRKVKAGKLIKGGKVTTSTWEDSRTGREQESVRDEPDSDSSLEVLEIPNPQLEVVAIDSSESGEEKPDSPSKKDIWNSTEQNPLETSRSGCDEVSSTSEIGTRYKDGIPVSVAETQTVISSIKGSKNSSEISSEPGDDDEPTEGSFEGHQAAVNAIQIFGNLLYTCSADKTVRVYNLVSRKCIGVFEGHTSKVNCLLVTQTSGKNAALYTGSSDHTIRCYNVKSRECVEQLQLEDRVLCLHSRWRILYAGLANGTVVTFNIKNNKRLEIFECHGPRAVSCLATAQEGARKLLVVGSYDCTISVRDARNGLLLRTLEGHSKTILCMKVVNDLVFSGSSDQSVHAHNIHTGELVRIYKGHNHAVTVVNILGKVMVTACLDKFVRVYELQSHDRLQVYGGHKDMIMCMTIHKSMIYTGCYDGSIQAVRLNLMQNYRCWWHGCSLIFGVVDHLKQHLLTDHTNPNFQTLKCRWKNCDAFFTARKGSKQDAAGHIERHAEDDSKIDS

SEQ ID NO: 99572 - protein, 575 aa, Homo sapiens
MEKIIQVAKTSAAQHIQSIMAAAGVPVVEGYHGEDQSDQCLKEHARRIGYPVMIKAVRGGGGKGMRIVRSEQEFQEQLESARREAKKSFNDDAMLIEKFVDTPRHVEVQVFGDHHGNAVYLFERDCSVQRRHQKIIEEAPAPGIKSEVRKKLGEAAVRAAKAVNYVGAGTVEFIMDSKHNFCFMEMNTRLQVEHPVTEMITGTDLVEWQLRIAAGEKIPLSQEEITLQGHAFEARIYAEDPSNNFMPVAGPLVHLSTPRADPSTRIETGVRQGDEVSVHYDPMIAKLVVWAADRQAALTKLRYSLRQYNIVGLHTNIDFLLNLSGHPEFEAGNVHTDFIPQHHKQLLLSRKAAAKESLCQAALGLILKEKAMTDTFTLQAHDQFSPFSSSSGRRLNISYTRNMTLKDGKNNVAIAVTYNHDGSYSMQIEDKTFQVLGNLYSEGDCTYLKCSVNGVASKAKLIILENTIYLFSKEGSIEIDIPVPKYLSSVSSQETQGGPLAPMTGTIEKVFVKAGDKVKAGDSLMVMIAMKMEHTIKSPKDGTVKKVFYREGAQANRHTPLVEFEEEESDKRESE

SEQ ID NO: 99573 - protein, 493 aa, Homo sapiens
MAVLLLLLRALRRGPGPGPRPLWGPGPAWSPGFPARPGRGRPYMASRPPGDLAEAGGRALQSLQLRLLTPTFEGINGLLLKQHLVQNPVRLWQLLGGTFYFNTSRLKQKNKEKDKSKGKAPEEDEGMGTTDHVIVLASTNRADILDGALMRPGRLDRHVFIDLPTLQERREIFEQHLKSLKLTQSSTFYSQRLAELTPGFSGADIANICNEAALHAAREGHTSVHTLNFEYAVERVLAGTAKKSKILSKEEQKVVAFHESGHALVGWMLEHTEAVMKVSITPRTNAALGFAQMLPRDQHLFTKEQLFERMCMALGGRASEALSFNEVTSGAQDDLRKVTRIAYSMVKQFGMAPGIGPISFPEAQEGLMGIGRRPFSQGLQQMMDHEARLLVAKAYRHTEKVLQDNLDKLQARALCVTWGSCLGPLDCRPQPAAAASGQVWAVPSPAEAGLPVDPCSSRLTKQLCRARAHHSGSHNGSKAAAGKRPSGKGSDKL

SEQ ID NO: 99574 - protein, 136 aa, Homo sapiens
MAIVQTLPVPLEPAPEAATAPQAPVMGSVSSLISGRPCPGGPAPPRHHGPPGPTFFRQQDGLLRGGYEAQEPLCPAVPPRKAVPVTSFTYINEDFRTESPPSPSSDVEDAREQRAHNAHLRGPPPKLIPVSGKLEK

SEQ ID NO: 99575 - protein, 137 aa, Homo sapiens
MASEAEKTFHRFAAFGESSSSGTEMNNKNFSKLCKDCGIMDGKTVTSTDVDIVFSKVKAKNARTITFQQFKEAVKELGQKRFKGKSPDEVLENIYGLMEGKDPATTGATWMLSSRLDSTHTPTPVRLNSNISLIQLQ

SEQ ID NO: 99576 - protein, 42 aa, Homo sapiens
  MOD_RES (1)..(1): Any amino acid
XPFVVSCINLAVPCIYSMFRLVERYEMPRHEVYVLLIRRGLM

SEQ ID NO: 99577 - protein, 190 aa, Homo sapiens
MLLLGLLLLLPLLAGARLLWNWWKLRSLHLPPLAPGFLHLLQPDLPIYLLGLTQKFGPIYRLHLGLQDVVVLNSKRTIEEAMVKKWADFAGRPEPLTYKLVSRNYPDLSLGDYSLLWKAHKKLTRSALLLGIRDSMEPVVEQLTQEFCERMRAQPGTPVAIEEEFSLLTCSIICYLTFGDKIKEVLKTWS

SEQ ID NO: 99578 - protein, 314 aa, Homo sapiens
  MOD_RES (1)..(1): Any amino acid
XAATEEPEVIPDPAKQTDRVVKIAGISAGILVFILLLLVVILIVKKRRSYYSYSYYLKLAKKRKDAMGNTRQEMTHMVNAMDRSYADQSTLHAEDPLSITFMDQHNFSPRLPNDPLVPTAVLDENHSATAESSRLLDVPRYLCEGTESPYQTGQLHPAIRVADLLQHINLMKTSDSYGFKEEYESFFEGQSASWDVAKKDQNRAKNRYGNIIAYDHSRVILQPVEDDPSSDYINANYIDGYQRPSHYIATQGPVHETVYDFWRMIWQEQSACIVMVTNLVEVGRVKCYKYWPDDTEVYGDFKVTCVEMEPLAEY

SEQ ID NO: 99579 - protein, 36 aa, Homo sapiens
MFYGIFLYLGEVTKAVQPLLLGRIIASYDPDNKEER

SEQ ID NO: 99580 - protein, 508 aa, Homo sapiens
MKGKGKHLAFTAMDCYRTSLSSSWIYPTVILCLFGFFSMMRPSEPFLIPYLSGPDKNLTSAEITNEIFPVWTYSYLVLLLPVFVLTDYVRYKPVIILQGISFIITWLLLLFGQGVKTMQVVEFFYGMVTAAEVAYYAYIYSVVSPEHYQRVSGYCRSVTLAAYTAGSVLAQLLVSLANMSYFYLNVISLASVSVAFLFSLFLPMPKKSMFFHAKPSREIKKSSSVNPVLEETHEGEAPGCEEQKPTSEILSTSGKLNKGQLNSLKPSNVTVDVFVQWFQDLKECYSSKRLFYWSLWWAFATAGFNQVLNYVQILWDYKAPSQDSSIYNGAVEAIATFGGAVAAFAVGYVKVNWDLLGELALVVFSVVNAGSLFLMHYTANIWACYAGYLIFKSSYMLLITIAVFQIAVNLNVERYALVFGINTFIALVIQTIMTVIVVDQRGLNLPVSIQFLVYGSYFAVIAGIFLMRSMYITYSTKSQKDVQSPAPSENPDVSHPEEESNIIMSTKL

SEQ ID NO: 99581 - protein, 77 aa, Homo sapiens
MSDQEAKPSTEDLGDKKEGEYIKLKVIGQDSSEIHFKVKMTTHLKKLKESYCQRQLGMEEEDVIEVYQEQTGGHSTV

SEQ ID NO: 99582 - protein, 118 aa, Homo sapiens; identical to SEQ ID NO: 3642

SEQ ID NO: 99583 - protein, 27 aa, Homo sapiens
  MOD_RES (1)..(1): Any amino acid
XIFTNVTQVSSCHILDRSLFFFPKNKV

SEQ ID NO: 99584 - protein, 121 aa, Homo sapiens
MWSRLVWLGLRAPLGGRQGFTSKADPQGSGRITAAVIEHLERLALVDFGSREAVARLEKAIAFADRLRAVDTDGVEPMESVLEDRLECSGVISAHYKLCFLHSSDSCASASQVAGITDVYT

SEQ ID NO: 99585 - protein, 284 aa, Homo sapiens
MAASAAETRVFLEVRGQLQSALLILGEPKEGGMPMNISIMPSSLQMKTPEGCTEIQLPAEVRLVPSSCRGLQFVVGDGLHLRLQTQAKLGTKLISMFNQSSQTQECCTFYCQSCGEVIIKDRKLLRVLPLPSENWGALVGEWCCHPDPFANKSLHPQENDCFIGDSFFLVNLRTSLWQQRPELSPVEMCCVSSDNHCKLEPKANTKVICKRCKVMLGETVSSETTKFYMTEIIIQSSERSFPIIPRSWFVQSVIAQCLVQLSSARSTFRFTIQAMAFKFRQFGD

SEQ ID NO: 99586 - protein, 125 aa, Homo sapiens
MRKEAVQRGRIPHSLPGAVAASSGSPPGSALAAVASGGDLFPGQPVSELIAQLLRAEPYPAAAGRFGAGGGAAGAVLGIDNVCELAARLLFSTVEWARHAPFFPELPVADQVALLRLSWSELFVL

SEQ ID NO: 99587 - protein, 60 aa, Homo sapiens
TPSSQSEGVMLKNDKKLYVSRGSASTSLPNETLSELETPGKYSLTPPNHWGHPHRYLQHL

SEQ ID NO: 99588 - protein, 155 aa, Homo sapiens
  MOD_RES (1)..(1): Any amino acid
XYRDDKIWSSYTEYIFFRSLTMSLCSILRLNIWLFMIACQIKHESRCRTRARCLAAGPPQKIVSPKQEHEDRKHDKVTDKGSESGTSCNELSTSSCDSHSEASTPQDNPSSAQQATAHQPNTLTLDRPSKKAPVQWIPPPDKRRNSELFQTLISK

SEQ ID NO: 99589 - protein, 151 aa, Homo sapiens
  MOD_RES (1)..(1): Any amino acid
XEPLNHPPGAPREADIVGCTVCPASGEESTSPEQAQTLGQDSLGPPEHFQGGPRGNEPAAHPPRWSTPSSYEDPAGGKHCEGPRSCIQAASDLPPYPLPPLPPPGGCHVSPARVRRPLLLSCPNTQDTLPGAQLCQWSSPSLMCVINGHCQ

SEQ ID NO: 99590 - protein, 1165 aa, Homo sapiens
MDNFAEGDFTVADYALLEDCPHVDDCVFAAEFMSNDYVRVTQLYCDGVGVQYKDYIQSERNLEFDICSIWCSKPISVLQDYCDAIKINIFWPLLFQHQNSSVISRLHPCVDANNSRASEINLKKLQHLELMEDIVDLAKKVAKILAMEEALNWIKYAGDVTILTKLGSIDNCWPMLSIFFTEYKYHITKIVMEDCNLLEELKTQSCMDCIEEGELMKMKGNEEFSKERFDIAIIYYTRAIEYRPENYLLYGNRALCFLRTGQFRNALGDGKRATILKNTWPKGHYRYCDALSMLGEYDWALQANIKAQKLCKNDPEGIKDLIQQHVKLQKQIEDLQGRTANKDPIKAFYENRAYTPRSLSAPIFTTSLNFVEKERDFRKINHEMANGGNQNLKVADEALKVDDCDCHPEFSPPSSQPPKHKGKQKSRNNESEKFSSSSPLTLPADLKNILEKQFSKSSRAAHQDFANIMKMLRSLIQDGYMALLEQRCRSAAQAFTELLNGLDPQKIKQLNLAMINYVLVVYGLAISLLGIGQPEELSEAENQFKRIIEHYPSEGLDCLAYCGIGKVYLKKNRFLEALNHFEKARTLIYRLPGVLTWPTSNVIIEESQPQKIKMLLEKFVEECKFPPVPDAICCYQKCHGYSKIQIYITDPDFKGFIRISCCQYCKIEFHMNCWKKLKTTTFNDKIDKDFLQGICLTPDCEGVISKIIIFSSGGEVKCEFEHKVIKEKVPPRPILKQKCSSLEKLRLKEDKKLKRKIQKKEAKKLAQERMEEDLRESNPPKNEEQKETVDNVQRCQFLDDRILQCIKQYADKIKSGIQNTAMLLKELLSWKVLSTEDYTTCFSSRNFLNEAVDYVIRHLIQENNRVKTRIFLHVLSELKEVEPKLAAWIQKLNSFGLDATGTFFSRYGASLKLLDFSIMTFLWNEKYGHKLDSIEGKQLDYFSEPASLKEARCLIWLLEEHRDKFPALHSALDEFFDIMDSRCTVLRKQDSGEAPFSSTKVKNKSKKKKPKDSKPMLVGSGTTSVTSNNEIITSSEDHSNRNSDSAGPFAVPDHLRQDVEEFEALYDQHSNEYVVRNKKLWDMNPKQKCSTLYDYFSQFLEEHGPLDMSNKMFSAEYEFFPEETRQILEKAGGLKPFLLGCPRFVVIDNCIALKKVASRLKKKRK

SEQ ID NO: 99591 - protein, 225 aa, Homo sapiens
GCFPDWYMLSLFGTGAILMRGAGCTINDMWDQDYDKKVTRTANRPIAAGDISTFQSFVFLGGQLTLALGVLLCLNYYSIALGAGSLLLVITYPLMKRISYWPQLALGLTFNWGALLGWSAIKGSCDPSVCLPLYFSGVMWTLIYDTIYAHQDKRDDVLIGLKSTALRFGENTKPWLSGFSVAMLGALSLVGVNSGQTAPYYAALGAVGAHLTHQKWGLEILPRLV

SEQ ID NO: 99592 - protein, 46 aa, Homo sapiens
MSNPSAPPPYEDRNPLYPGPPPPGGYGQPSVLPGGYPAYPGYPQPG

SEQ ID NO: 99593 - protein, 194 aa, Homo sapiens
MNGQLDLSGKLIIKAQLGEDIRRIPIHNEDITYDELVLMMQRVFRGKLLSNDEVTIKYKDEDGDLITIFDSSDLSFAIQCSRILKLTLFVNGQPRPLESSQVKYLRRELIELRNKVNRLLDSLEPPGEPGPSTNIPENEIGFCQAGLELLTSSDLPTSASQSAGITGMSCCTRLPSCIILMQIPYTSFHLYCGW

SEQ ID NO: 99594 - protein, 450 aa, Homo sapiens
MSRINKNVVLALLTLTSSAFLLFQLYYYKHYLSTKNGAGLSKSKGSRIGFDSTQWRAVKKFIMLTSNQNVPVFLIDPLILELINKNFEQVKNTSHGSTSQCKFFCVPRDFTAFALQYHLWKNEEGWFRIAENMGFQCLKIESKDPRLDGIDSLSGTEIPLHYICKLATHAIHLVVFHERSGNYLWHGHLRLKEHIDRKFVPFRKLQFGRYPGAFDRPELQQVTVDGLEVLIPKDPMHFVEEVPHSRFIECRYKEARAFFQQYLDDNTVEAVAFRKSAKELLQLAAKTLNKLGVPFWLSSGTCLGWYRQCNIIPYSKDVDLGIFIQDYKSDIILAFQDAGLPLKHKFGKVEDSLELSFQGKDDVKLDVFFFYEETDHMWNGGTQAKTGKKFKYLFPKFTLCWTEFVDMKVHVPCETLEYIEANYGPSPKILYIGRLAWEKTHHSEGSLLVK

SEQ ID NO: 99595 - protein, 31 aa, Homo sapiens
  MOD_RES (1)..(1): Any amino acid
XKMFIGGLSWQTSPALETILANLEKLENVWS

SEQ ID NO: 99596 - protein, 10 aa, Homo sapiens
  MOD_RES (1)..(1): Any amino acid
XAVMWRKKSS

SEQ ID NO: 99597 - protein, 35 aa, Homo sapiens
DEERDPLLHSFGHLKEVLNSITESCCVTQAGVKML

SEQ ID NO: 99598 - protein, 4374 aa, Homo sapiens
  MOD_RES (1)..(1): Any amino acid
XTTEDTLITGSKTAAPVTSTGSTTATLEGQSTAASSRTSNQDISASSQNHQTKSTETTSKAQTDTLTQMMTSTLFSSPSVHNVMETAPPDEMTTSFPSSVTNTLMMTSKTITMTTSTDSTLGNTEETSTAGTESSTPVTSAVSITAGQEGQSRTTSWRTSIQDTSASSQNHWTRSTQTTRESQTSTLTHRTTSTPSFSPSVHNVTGTVSQKTSPSGETATSSLCSVTNTSMMTSEKITVTTSTGSTLGNPGETSSVPVTGSLMPVTSAALVTFDPEGQSPATFSRTSTQDTTAFSKNHQTQSVETTRVSQINTLNTLTPVTTSTVLSSPSGFNPSGTVSQETFPSGETTTSSPSSVSNTFLVTSKVFRMPTSRDSTLGNTEETSLSVSGTISAITSKVSTIWWSDTLSTALSPSSLPPKISTAFHTQQSEGAETTGRPHERSSFSPGVSQEIFTLHETTTWPSSFSSKGHTTWSQTELPSTSTGAATRLVTGNPSTGTAGTIPRVPSKVSAIGEPGEPTTYSSHSTTLPKTTGAGAQTQWTQETGTTGEALLSSPSYSVTQMIKTATSPSSSPMLDRHTSQQITTAPSTNHSTIHSTSTSPQESPAVSQRGHTQAPQTTQESQTTRSVSPMTDTKTVTTPGSSFTASGHSPSEIVPQDAPTISAATTFAPAPTGDGHTTQAPTTALQAAPSSHDATLGPSGGTSLSKTGALTLANSVVSTPGGPEGQWTSASASTSPDTAAAMTHTHQAESTEASGQTQTSEPASSGSRTTSAGTATPSSSGASGTTPSGSEGISTSGETTRFSSNPSRDSHTTQSTTELLSASASHGAIPVSTGMASSIVPGTFHPTLSEASTAGRPTGQSSPTSPSASPQETAAISRMAQTQRTRTSRGSDTISLASQATDTFSTVPPTPPSITSTGLTSPQTETHTLSPSGSGKTFTTALISNATPLPVTYASSASTGHTTPLHVTDASSVSTGHATPLPVTSPSSVSTGHTTPLPVTDTSSESTGHVTPLPVTSFSSASTGDSTPLPVTDTSSASTGHVTPLPVTSLSSASTGDTTPLPVTDTSSASTGHATSLPVTDTSSVSTGHTTPLPVTDTSSASTGHATSLPVTDTSSVSTGHTTPLHVTDASSASTGQATPLPVTSLSSVSTGDTTPLPVTSPSSASTGHATPLLVTDTSSASTGHATPLPVTDASSVSTDHATSLPVTIPSAASTGHTTPLPVTDTSSASTGQATSLLVTDTSSVSTGDTTPLPVTSTSSASTGHVTPLHVTSPSSASTGHATPLPVTSLSSASTGDTMPLPVTSPSSASTGDTTPLPVTDASSVSTGHTTPLHVTDASSASTGQATPLPVTSLSSVSTGDTTPLPVTSPSSASTGHATPLLVTDTSSASTGHATPLPVTDASSVSTDHATSLPVTIPSAASTGHTTPLPVTDTSSASTGQATSLLVTDTSSVSTGDTTPLPVTSTSSASTGHVTPLHVTSPSSASTGHATPLPVTSLSSASTGDTMPLPVTSPSSASTGDTTPLPVTDASSVSTGHTTPLPVTSPSSASTGHTTPLPVTDTSSASKGDTTPLPVTSPSSASTGHTTPLPVTDTSSASTGDTTPLPVTNASSLSTGHATPLHVTSPSSASTGHATPLPVTSTSSASTGHATPLPVTGLSSATTDDTTRLPVTDVSSASTGQATPLPVTSLSSVSTGDTTPLPVTSPSSASTGHASPLLVTDASSASTGQATPLPVTDTSSVSTAHATPLPVTGLSSASTDDTTRLPVTDVSSASTGQAIPLPVTSPSSASTGDTTPLPVTDASSASTGDTTSLPVTIPSSASSGHTTSLPVTDASSVSTGHATSLLVTDASSVSTGDTTPLPVTDTNSASTGDTTPLHVTDASSVSTGHATSLPVTSLSSASTGDTTPLPVTSPSSASSGHTTPLPVTDASSVPTGHATSLPVTDASSVSTGHATPLPVTDASSVSTGHATPLPVTDTSSVSTGQATPLPVTSLSSASTGDTTPLPVTDTSSASTGHAPHLPVTGLSSASTGDTTRLPVTNVSSASTGHATPLPVTSTSSASTGDTTPLPGTDTSSVSTGHTTPLLVTDASSVSTGDTTRLPVTSPSSASTGHTTPLHVTDASSVSTGHTTPLPVTDTSSASTGQATSLLVTDTSSVSTGDTTPLPVTSTSSASTGHVTPLHVTSPSSASTGHATPLPVTSLSSASTGDTTPLPVTDTSSVSTGHTTPLPVTSPSSASTGHTTPLPVTDTSSASKGDTTPLPVTSPSSASTGHTTPLPVTDTSSASTGDTTPLPVTNASSLSTGHATPLHVTSPSSASTGHATPLPVTSTSSASTGHATPLPVTSTSSASTGHATPLPVTDNSSVSTGHATPLPVTGLSSATTDDTTRLPVTDVSSASTGQATPLPVTSLSSVSTGDTTPLPVTSPSSASTGHASPLLVTDASSASTGQATPLPVTDTSSVSTAHATPLPVTGLSSASTDDTTRLPVTDVSSASTGQAIPLPVTSPSSASTGDTTPLPVTDASSASTGDTTSLPVTIPSSASSGHTTSLPVTDASSVSTGHATSLLVTDASSVSTGDTTPLPVTDTNSASTGDTTPLHVTDASSVSTGHATSLPVTSLSSASTGDTTPLPVTSPSSASSGHTTSLPVTDASSVSTGHATSLPVTIPSSASSGHTTPLPVTDASSVPTGHATSLPVTDASSVSTGHATPLPVTDASSVSTGHATPLPVTDTSSVSTGQATPLPVTSLSSASSTGDTTPLPVTDTSSASTGQDTPLPVTSLFSVSTGDTTPLPVTSPSSASTGHATHLLVTDASSVSTGHATSLLVTDASSVSTGHATALHVTDASSLSTGDTTPLPVTSPSSASTGDTTPLPVTDTSSVSTGHATSLPVTDTSSASTGHATSLPVTDTSSASTGQATPLPVTSPSSASTGHAIPLLVTDTSSASTGQATPLPVTSLSSASTGDTTPLPVTDASSVSTGHATSLPVTSLSSVSTGDTTPLPVTSPSSASTGHATPLHVTSPSSASTGHATPLPVTSLSSASTGDTTPLPVTSPSSASTGHATPLHVTDASSVSTGDTTPLPVTSPSSASSGHTTPLPVTDASSASTGDTTPLPVTDTSSASTGHATHLPVTGLSSASTGDTTRLPVTDVSSASTGHATPLPVTSTSSASTGDTTPLPGTDTSSVSTGHTTPLLVTDASSVSTGDTTRLPVTSPSSASTGHTTPLPVTDTPSASTGDTTPLPVTNASSLSTRHATSLHVTSPSSASTGHATPLPVTDTSAASTGHATPLPVTSTSSASTGDTTPLPVTDTSSASTGHATPLPVTNTSSVSTGHATPLHVTSPSSASTGHTTPLPVTDASSVSTGHATSLPVTDASSVSTGHATPLPVTDASSVSTGHATPLPLTSLSSVSTGDTTPLPVTDTSSASTGQATPLPVTSLSSVSTGDTTPLPVTDTSSASTGHATSLPVTDTSSASTGHATPLHVTSPSSASTGHATPLPVTDTSSASTGHATPLPVTSLSSVSTGDTTPLPVTSPSSASTGHATPLLVTDASSASTGQATPLPVTSLSSVSTGDTTPLPVTSPSSASTGHATSLPVTDTSSASTGDTTSLPVTDTSSAYTGDTTSLPVTDTSSSSTGDTTPLLVTETSSASTGDTTPVPVTDTSSVSTGHATPLPVTGLSSASTGDTTRLPVTDISSASTGQATPLPVTNTSSVSTGDTMPLPVTSPSSASTGHATPLPVTSTSSASTGHATPVPVTSTSSASTGHTTPLPVTSPSSASTGHTTPLPVTDTSSASTGDTTPLPVTNASSLSTGHTTPLHVTIPSSASTGDTSTLPVTGASSASTGHATPLPVTDTSSVSTGHATPLPVTSFSSVSTGDTTPLPVTDASSASTGHATPLPVTDTSSASTGDTTPLPVTDASSASTGQATPLPVTSLSSVSTGDTTPLPVTIPSSASSGHTTSLPVSDTSSASTGQATPLPVTSLSSVSTGDTTPLLVTDASSVSTGHATPLPVTDTSSASTGDTTRLPVTDTSSASTGQATPLPVTSLSSVSTGDTTPLLVTNTSSVSTGHATSLPVTIPSSSSSGHTTPLPVTSTSSVSTGHVTPLHVTSPSSSSTGQATPLPVTSTSSSSTGQATPLPVTSTSSASTGHATPLPVTDASSVSTGHATPLPVTDTSSASTGDTTPLPVTDTSSASTGQATPLPVTSLSSVSTGHATPLAVSSATSASTVSSDSPLKMETSGMTTPSLKTDGGRRTATSPPPTTSQTIISTIPSTAMHTRSTAAPIPILPERGVSLFPYGADAGDLEFVRRTVDFTSPLFKPATGFPLGSSLRDSLYASQAGTLWPWWLRSGTMLTSPLVGGPHFIRNTRRSMVNTAC

SEQ ID NO: 99599 - protein, 74 aa, Homo sapiens
MPLGADCARYTTLSLLRRARMHIQKLEDQEQRARQLKERLRSKQQSLQRQLEQLRGLAGAAERERLRADSLDSS

SEQ ID NO: 99600 - protein, 136 aa, Homo sapiens
MSWKKALRIPGGLRAATVTLMLAMLSTPVAEGRDSPEDFVYQFKAMCYFTNGTERVRYVTRYIYNREEYARFDSDVEVYRAVTPLGPPDAEYWNSQKEVLERTRAELDTVCRHNYQLELRTTLQRRGTVTGPSRSW

SEQ ID NO: 99601 - protein, 38 aa, Homo sapiens
MPLLDSSYLPPTIFILTHVLGVAGVLYWKRHARGRAGN

SEQ ID NO: 99602 - protein, 170 aa, Homo sapiens
  MOD_RES (1)..(1): Any amino acid
XLDEDLKKLKQLKQSEANADTKEKLPLRLRIFEKFPNRPQMVKISKLPSDFTVPKIRESFMKQFIDRQQQDTCCLLRSLPTTSSSSCDHSKRSAIEDNKYIDQKLRKSVFSIRARNLLEKETAVTKILRMYRLFPHPCSGTLRKKTWRQRRKEPGTPCYCVYKQLVVFKG

SEQ ID NO: 99603 - protein, 433 aa, Homo sapiens
  MOD_RES (1)..(1): Any amino acid
XDKGRERMAAAAAAAAAAAAAAQCRSPRCAAERRGFRRELDSWRHRLMHCVGFESILEGLYGPRLRRDLSLFEDCEPEELTDWSMDEKCSFCNLQREAVSDCIPSLDSSQSTPTEELSSQGQSNTDKIECQAENYLNALFRKKDLPQNCDPNIPLVAQELMKKMIRQFAIEYISKSGKTQENRNGSIGPSIVCKSIQMNQAENSLQEEQEGPLDLTVNRMQEQNTQQGDGVLDLSTKKTSIKSEESSICDPSSENSVAGRLHRNREDYVERSAEFADGLLSKALKDIQSGALDINKAGILYGIPQKTLLLHLEALPAGKPASFKNKTRDFHDSYSYKDSKETCAVLQKVALWARAQAERTEKSKLNLLETSEIKFPTASTYLHQLTLQKMVTQFKEKNESLQYETSNPTVQLKIPQLRPPDLLSLSEHATSEN

SEQ ID NO: 99604 - protein, 50 aa, Homo sapiens
  MOD_RES (1)..(1): Any amino acid
XPSMVSAYMYPAGATGAQAAPQAQAGPTASPAYSSYQPTPTAGYQPYNMQ

SEQ ID NO: 99605 - protein, 157 aa, Homo sapiens
  MOD_RES (1)..(1): Any amino acid
XLALAFHDGSVHIVHRLSLQTMAVFYSSAAPRPVDEPAMKRPRTAGPAVHLKAMQLSWTSLALVGIDSHGKVLSTRILAMKASLCKLSPCTVTRVCDYHTKLFLIAISSTLKSLLRPHFLNTPDKSPGDRLTEICTKITDVDIDKVMINLKTEEFVL

SEQ ID NO: 99606 - protein, 246 aa, Homo sapiens
  MOD_RES (1)..(1): Any amino acid
XMSPTVIILACLGFFLDQSVWAHVGLYEKPSLTARPGPTVRTGENVTLSCSSQSSFDIYHLSREGEAHELRLPAVPSINGTFQADFPLGPATHGETYRCFGSFHGSPYEWSDASDPLPVSVTGNPSSSWPSPTEPSFKTDAAVMNQEPAGHRTVNREDSDEQDPQEVTYAQLDHCIFTQRKITGPSQRSKRPSTDTSVCIELPNAEPRALSPAHEHHSQALMGSSRETTALSQTQLASSNVPAAGI

SEQ ID NO: 99607 - protein, 147 aa, Homo sapiens
MWRGIDSIYPYELLQKNILPAGTCCIYSRVEVFTDVNYEDFTFTIPDVEDSSQRPDQGPQRPPPEGLLPRPPGDSGNQDDGPQQRPPKPGGHHRHPPPPPFQNQQRPPRRGHRQLSLPRFPSVSLQEASSFFQRDRPARHPQEQPLW

SEQ ID NO: 99608 - protein, 604 aa, Homo sapiens
MANVPWAEVCEKFQAALALSRVELHKNPEKEPYKSKYSARALLEEVKALLGPAPEDEDERPEAEDGPGAGDHALGLPAEVVEPEGPVAQRAVRLAVIEFHLGVNHIDTEELSAGEEHLVKCLRLLRRYRLSHDCISLCIQAQNNLGILWSEREEIETAQAYLESSEALYNQYMKEKLTEQERSKRFEKVYTHNLYYLAQVYQHLEMFEKAAHYCHSTLKRQLEHNAYHPIEWAINAATLSQFYINKLCFMEARHCLSAANVIFGQTGKISATEDTPEAEGEVPELYHQRKGEIARCWIKYCLTLMQNAQLSMQDNIGELDLDKQSELRALRKKELDEEESIRKKAVQFGTGELCDAISAVEEKVSYLRPLDFEEARELFLLGQHYVFEAKEFFQIDGYVTDHIEVVQDHSALFKVLAFFETDMERRCKMHKRRIAMLEPLTVDLNPQYYLLVNRQIQFEIAHAYYDMMDLKVAIADRLRDPDSHIVKKINNLNKSALKYYQLFLDSLRDPNKVFPEHIGEDVLRPAMLAKFRVARLYGKIITADPKKELENLATSLEHYKFIVDYCEKHPEAAQEIEVELELSKEMVSLLPTKMERFRTKMALT

SEQ ID NO: 99609 - protein, 816 aa, Homo sapiens
MPTAAAPIISSVQKLVLYETRARYFLVGSNNAETKYRVLKIDRTEPKDLVIIDDRHVYTQQEVRELLGRLDLGNRTKMGQKGSSGLFRAVSAFGVVGFVRFLEGYYIVLITKRRKMADIGGHAIYKVEDTNMIYIPNDSVRVTHPDEARYLRIFQNVDLSSNFYFSYSYDLSHSLQYNLTVLRMPLEMLKSEMTQNRQESFDIFEDEGLITQGGSGVFGICSEPYMKYVWNGELLDIIKSTVHRDWLLYIIHGFCGQSKLLIYGRPVYVTLIARRSSKFAGTRFLKRGANCEGDVANEVETEQILCDASVMSFTAGSYSSYVQVRGSVPLYWSQDISTMMPKPPITLDQADPFAHVAALHFDQMFQRFGSPIIILNLVKEREKRKHERILSEELVAAVTYLNQFLPPEHTIVYIPWDMAKYTKSKLCNVLDRLNVIAESVVKKTGFFVNRPDSYCSILRPDEKWNELGGCVIPTGRLQTGILRTNCVDCLDRTNTAQFMVGKCALAYQLYSLGLIDKPNLQFDTDAVRLFEELYEDHGDTLSLQYGGSQLVHRVKTYRKIAPWTQHSKDIMQTLSRYYSNAFSDADRQDSINLFLGVFHPTEGKPHLWELPTDFYLHHKNTMRLLPTRRSYTYWWTPEVIKHLPLPYDEVICAVNLKKLIVKKFHKYEEEIDIHNEFFRPYELSSFDDTFCLAMTSSARDFMPKTVGIDPSPFTVRKPDETGKSVLGNKSNREEAVLQRKTAASAPPPPSEEAVSSSSEDDSGTDREEEGSVSQRSTPVKMTDAGDSAKVTEVRGREACGIQPEALENDLYNSAFS

SEQ ID NO: 99610 - protein, 418 aa, Homo sapiens
  MOD_RES (1)..(1): Any amino acid
XLEESRQKCPPCWYKFANMCLIWDCCKPWLKVKHLVNLVVMDPFVDLAITICIVLNTLFMAMEHYPMTEQFSSVLSVGNLVFTGIFTAEMFLKIIAMDPYYYFQEGWNIFDGFIVSLSLMELGLANVEGLSVLRSFRLLRVFKLAKSWPTLNMLIKIIGNSVGALGNLTLVLAIIVFIFAVVGMQLFGKSYKECVCKISNDCELPRWHMHDFFHSFLIVFRVLCGEWIETMWDCMEVAGQTMCLTVFMMVMVIGNLVVLNLFLALLLSSFSSDNLAATDDDNEMNNLQIAVGRMQKGIDFVKRKIREFIQKAFVRKQKALDEIKPLEDLNNKKDSCISNHTTIEIGKDLNYLKDGNGTTSGIGSSVEKYVVDESDYMSFINNPSLTVTVPIAVGESDFENLNTEEFSSESDMEESKEE

SEQ ID NO: 99611 - protein, 145 aa, Homo sapiens
  MOD_RES (1)..(1): Any amino acid
XYYEGLQDKLAQIRDARGALSALREEHREKLRRAAEEAERQRQIQLAQKLEIMRQKKQVSTWRCRGSWPSSACRSRRRSGRCGWSSRSRRSRCARRCPPSPCPTPSSRPCPQPEVCSTSPRDQPASPAPSALPARWRAPQCTACT

SEQ ID NO: 99612 - protein, 88 aa, Homo sapiens
  MOD_RES (1)..(1): Any amino acid
XYYEGLQDKLAQIRDARGALSALREEHREKLRRAAEEAERQRQIQLAQKLEIMRQKKQEKERQMRLEQQKQTVQMRAQMPAFPLPYAQ

SEQ ID NO: 99613 - protein, 89 aa, Homo sapiens
  MOD_RES (1)..(1): Any amino acid
XKMFIGGLSWQTSPDSLRDYFSKFGEIRECMVMRDPTTKRSRGFGFVTFADPASVDKVLGQPHHELDSKTIDPKVAFPRRAQPKRASQS

SEQ ID NO: 99614 - protein, 276 aa, Homo sapiens
MNPREEKVKIITEEFIENDEDADMGRQNKNSKVRRQPRKKQPPTAVPKEMVSEKSHLGNPQEPVQEEPKTRLLSMTVRRGPRSLPPIPSTSRTGFAEFSMRGRMREKLQAARSKAESALLQEIPTPRPRRLRSPSKKELETEFGTEPGKEVERTQQEVDSQSYSRVKFHDSARKIKPKPQVPPGFPSAEEAYNFFTFNFDPEPEGSEEKPKARHRAGTNQEEEEGEEEEPPAQGGGKEMVFNIRMVMRCGWRARRKKLMSLQERKWLRRNLPPPGE

SEQ ID NO: 99615 - protein, 125 aa, Homo sapiens
TRRAMTLKSLLRALVNMPPHYRYLCISHLIGWTAFLSNMLFFTDFMGQIVYRGDPYSAHNSTEFLIYERGVEVGCWGLCINSVFSSLYSYFQKVLVSYIGLKGLYFTGYLLFGLGTGFIGLFPNV

SEQ ID NO: 99616 - protein, 743 aa, Homo sapiens
MPTAAAPIISSVQKLVLYETRARYFLVGSNNAETKYRVLKIDRTEPKDLVIIDDRHVYTQQEVRELLGRLDLGNRTKMGQKGSSGLFRAVSAFGVVGFVRFLEGYYIVLITKRRKMADIGGHAIYKVEDTNMIYIPNDSVRVTHPDEARYLRIFQNVDLSSNFYFSYSYDLSHSLQYNLTVLRMPLEMLKSEMTQNRQESFDIFEDEGLITQGGSGVFGICSEPYMKYVWNGELLDIIKSTVHRDWLLYIIHGFCGQSKLLIYGRPVYVTLIARRSSKFAGTRFLKRGANCEGDVANEVETEQILCDASVMSFTAGSYSSYVQVRGSVPLYWSQDISTMMPKPPITLDQADPFAHVAALHFDQMFQRFGSPIIILNLVKEREKRKHERILSEELVAAVTYLNQFLPPEHTIVYIPWDMAKYTKSKLCNVLDRLNVIAESVVKKTGFFVNRPDSYCSILRPDEKWNELGGCVIPTGRLQTGILRTNCVDCLDRTNTAQFMVGKCALAYQLYSLGLIDKPNLQFDTDAVRLFEELYEDHGDTLSLQYGGSQLVHRVKTYRKIAPWTQHSKDIMQTLSRYYSNAFSDADRQDSINLFLGVFHPTEGKPHLWELPTDFYLHHKNTMRLLPTRRSYTYWWTPEVIKHLPLPYDEVICAVNLKKLIVKKFHKYEEEIDIHNEFFRPYELSSFDDTFCLAMTSSARHTLGAVSLPEARSLIHQKSWNCCVFGIYCGIWSGFSSNGEVAFA

SEQ ID NO: 99617 - protein, 128 aa, Homo sapiens; identical to SEQ ID NO: 44672
  MOD_RES (1)..(1): Any amino acid

SEQ ID NO: 99618 - protein, 186 aa, Homo sapiens
NEPLTPGYHGFPARDSQGNQEPTTTPDAMVQPFTTIPFPPPPQNGIPTEYGVPHTQDYAGQTGEHNLTLYGSTQAHGEQSSNSPSTQNGSLTQTEGGAQTDGQQSQTQSSENSESKSTPKRLHVSNIPFRFRDPDLRQMFGQFGKILDVEIIFNERGSKGFGFVTFENSADADRAREKLHGTVVEG

SEQ ID NO: 99619 - protein, 838 aa, Homo sapiens
MPTAAAPIISSVQKLVLYETRARYFLVGSNNAETKYRVLKIDRTEPKDLVIIDDRHVYTQQEVRELLGRLDLGNRTKMGQKGSSGLFRAVSAFGVVGFVRFLEGYYIVLITKRRKMADIGGHAIYKVEDTNMIYIPNDSVRVTHPDEARYLRIFQNVDLSSNFYFSYSYDLSHSLQYNLTVLRMPLEMLKSEMTQNRQESFDIFEDEGLITQGGSGVFGICSEPYMKYVWNGELLDIIKSTVHRDWLLYIIHGFCGQSKLLIYGRPVYVTLIARRSSKFAGTRFLKRGANCEGDVANEVETEQILCDASVMSFTAGSYSSYVQVRGSVPLYWSQDISTMMPKPPITLDQADPFAHVAALHFDQMFQRFGSPIIILNLVKEREKRKHERILSEELVAAVTYLNQFLPPEHTIVYIPWDMAKYTKSKLCNVLDRLNVIAESVVKKTGFFVNRPDSYCSILRPDEKWNELGGCVIPTGRLQTGILRTNCVDCLDRTNTAQFMVGKCALAYQLYSLGLIDKPNLQFDTDAVRLFEELYEDHGDTLSLQYGGSQLVHRVKTYRKIAPWTQHSKDIMQTLSRYYSNAFSDADRQDSINLFLGVFHPTEGKPHLWELPTDFYLHHKNTMRLLPTRRSDFMPKTVGIDPSPFTVRKPDETGKSVLGNKSNREEAVLQRKTAASAPPPPSEEAVSSSSEDDSGTDREEEGSVSQRSTPVKMTDAGDSAKVTENVVQPMKELYGINLSDGLSEEDFSIYSRFVQLGQSQHKQDKNSQQPCSRCSDGVIKLTPISAFSQDNIYEVQPPRVDRKSTEIFQAHIQASQGIMQPLGKEDSSMYREYIRNRYL

SEQ ID NO: 99620 - protein, 18 aa, Homo sapiens
  MOD_RES (1)..(1): Any amino acid
XEGPTQKLFLKRNNGPEQ

SEQ ID NO: 99621 - protein, 179 aa, Homo sapiens
  MOD_RES (1)..(1): Any amino acid
XQFRVIGPRHPIRALVGDEVELPCRISPGKNATGMEVGWYRPPFSRVVHLYRNGKDQDGDQAPEYRGRTELLKDAIGEGKVTLRIRNVRFSDEGGFTCFFRDHSYQEEAAMELKVEDPFYWVSPGVLVLLAVLPVLLLQITLGLVFLCLQYRLRGKLRAEIENLHRTFGQFLEELRNPF

SEQ ID NO: 99622 - protein, 44 aa, Homo sapiens
  MOD_RES (1)..(1): Any amino acid
XYWRATHTTSSTPMTPLLGRNLGSTALSPYPTAISGLQRKLPRD

SEQ ID NO: 99623 - protein, 194 aa, Homo sapiens
  MOD_RES (1)..(1): Any amino acid
XLQYVTESMAYMVSANMDQGATDFQIEAAISKIFGSEAAWKVTDECIQIMGGMGFMKEPGVERVLRDLRIFRIFEGTNDILRLFVALQGCMAGRAGQRPESQRTCPPGVESEWRAVRALEQFATVVEAKLIKHKKGIVNEQFLLQRLADGAIDLYAMVVVLSRASRSLSEGHPTAQHEKMLCDTWCIEAAARIR

SEQ ID NO: 99624 - protein, 70 aa, Homo sapiens
MPFDFRRFDIYRKVPKDLTQPTYTGAIISICCCLFILFLFLSELTGFITTEVPTLGEESVQASWQWLTQS

SEQ ID NO: 99625 - protein, 148 aa, Homo sapiens
MLPWTALGLALSLRLALARSGAERGPLGEGKHPLKESWGPGGPCLAVGLSGGPTPEAEHSSFPPGPPASAPRGDLMFLLDSSASVSHYEFSRVREFVGQLVAPLPLGTGALRASLVHVGSRPYTEFPFGQHSSGEAAQDAVRASAQRM

SEQ ID NO: 99626 - protein, 346 aa, Homo sapiens
MVLSQRQRDELNRAIADYLRSNGYEEAYSVFKKEAELDVNEELDKKYAGLLEKKWTSVIRLQKKVMELESKLNEAKEEFTSGGPLGQKRDPKEWIPRPPEKYALSGHRSPVTRVIFHPVFSVMVSASEDATIKVWDYETGDFERTLKGHTDSVQDISFDHSGKLLASCSADMTIKLWDFQGFECIRTMHGHDHNVSSVAIMPNGDHIVSASRDKTIKMWEVQTGYCVKTFTGHREWVRMVRPNQDGTLIASCSNDQTVRVWVVATKECKAELREHEHVVECISWAPESSYSSISEATGSETKKSGKPGPFLLSGSRDKTIKMWDVSTGMCLMTLDMTDICGSIFKN

SEQ ID NO: 99627 - protein, 81 aa, Homo sapiens; identical to SEQ ID NO: 61489
  MOD_RES (1)..(1): Any amino acid

SEQ ID NO: 99628 - protein, 51 aa, Homo sapiens
  MOD_RES (1)..(1): Any amino acid
XQTLPPLNNFSVAECQLMKTERPRPNTFVIRCLQWTTVIERTFHVDSPDES

SEQ ID NO: 99629 - protein, 57 aa, Homo sapiens
MAHLKRLVKLHIKRHYHKKFWKLGAVIFFFIIVLVLMQREVSVQYSKEESRMERNMK

SEQ ID NO: 99630 - protein, 50 aa, Homo sapiens
MSGTLEKVLCLRNNTIFKQAFSLLRWNSTKYQSALQDKAHPRHWKVQALN

SEQ ID NO: 99631 - protein, 274 aa, Homo sapiens
MLRYPYFCRMYKECLSCWLESGIPNLGVWPNRIHTTAEKYREYEAREQTDQTQAQELHRSQDRDFETMAKLHIPVMVDEVVHCLSPQKGQIFLDMTFGSGGHTKAILQKESDIVLYALDRDPTAYALAEHLSELYPKQIRAMLGQFSQAEALLMKAGVQPGTFDGVLMDLGCSSMQLDTPERGFSLRKDGPLDMRMDGGRYPDMPTAADVVNALDQQALASILRTYGEEKHAKKIASAIVQARSIYPITRTQQLASIVAGCTGESKLFWRCPKA

SEQ ID NO: 99632 - protein, 194 aa, Homo sapiens
MSPSGRLCLLTIVGLILPTRGQTLKDTTSSSSADSTIMDIQVPTRAPDAVYTELQPTSPTPTWPADETPQPQTQTQQLEGTDGPLVTDPETHKSTKAAHPTDDTTTLSERPSPSTDVQTDPQTLKPSGFHEDDPFFYDEHTLRKRGLLVAAVLFITGIIILTSENWGWVGRTPRPGGGLMTEGWVLKGPWAILF

SEQ ID NO: 99633 - protein, 252 aa, Homo sapiens
MCDFMNLSLADCLLVNLAYESSVFCTSIVAQDSRGHIYHGRNLDYPFGNVLRKLTVDVQFLKNGQIAFTGTTFIGYVGLWTGQSPHKFTVSGDERDKGWWWENAIAALFRRHIPVSWLIRATLSESENFEAAVGKLAKTPLIADVYYIVGGTSPREGVVITRNRDGPADIWPLDPLNGAWFRVETNYDHWKPAPKEDDRRTSAIKALNATGQANLSLEALFQVTCVTVSCIPRMFGVLLIVNMKNSVKSSGR

SEQ ID NO: 99634 - protein, 608 aa, Homo sapiens
MAQSSPQLDIQVLHDLRQRFPEIPEGVVSQCMLQNNNNLEACCRALSQESSKYLYMEYHSPDDNRMNRNRLLHINLGIHSPSSYHPGDGAQLNGGRTLVHSSSDGHIDPQHAAGKQLICLVQEPHSAPAVVAATPNYNPFFMNEQNRSAATPPSQPPQQPSSMQTGMNPSAMQGPSPPPPPPSYMHIPRYSTNPITVTVSQNLPSGQTVPRALQILPQIPSNLYGSPGSIYIRQTSQSSSGRQTPQSTPWQSSPQGPVPHYSQRPLPVYPHQQNYQPSQYSPKQQQIPQSAYHSPPPSQCPSPFSSPQHQVQPSQLGHIFMPPSPSTTPPHPYQQGPPSYQKQGSHSVAYLPYTASSLSKGSMKKIEITVEPSQRPGTAINRSPSPISNQPSPRNQHSLYTATTPPSSSPSRGISSQPKPPFSVNPVYITYTQPTGPSCTPSPSPRVIPNPTTVFKITVGRATTENLLNLVDQEERSAAPEPIQPISVIPGSGGEKGSHKYQRSSSSGSDDYAYTQALLLHQRARMERLAKQLKLEKEELERLKSEVNGMEHDLMQRRLRRVSCTTAIPTPEEMTRLRSMNRQLQINVDCTLKEVDLLQSRGIDLIIW

SEQ ID NO: 99635 - protein, 891 aa, Homo sapiens
MLPTEVPQSHPGPSALLLLQLLLPPTSAFFPNIWSLLAAPGSITHQDLTEEAALNVTLQLFLEQPPPGRPPLRLEDFLGRTLLADDLFAAYFGPGSSRRFRAALGEVSRANAAQDFLPTSRNDPDLHFDAERLGQGRARLVGALRETVVAARALDHTLARQRLGAALHALQDFYSHSNWVELGEQQPHPHLLWPRQELQNLAQVADPTCSDCEELSCPRNWLGFTLLTSGYFGTHPPKPPGKCSHGGHFDRSSSQPPRGGINKDSTSPGFSPHHMLHLQAAKLALLASIQAFSLLRSRLGDRDFSRLLDITPASSLSFVLDTTGSMGEEINAAKIQARHLVEQRRGSPMEPVHYVLVPFHDPGFGPVFTTSDPDSFWQQLNEIHALGGGDEPEMCLSALQLALLHTPPLSDIFVFTDASPKDAFLTNQVESLTQERRCRVTFLVTEDTSRVQGRARREILSPLRFEPYKAVALASGGEVIFTKDQHIRDVAAIVGESMAALVTLPLDPPVVVPGQPLVFSVDGLLQKITVRIHGDISSFWIKNPAGVSQGQEEGGGPLGHTRRFGQFWMVTMDDPPQTGTWEIQVTAEDTPGVRVQAQTSLDFLFHFGIPMEDGPHPGLYPLTQPVAGLQTQLLVEVTGLGSRANPGDPQPHFSHVILRGVPEGAELGQVPLEPVGPPERGLLAASLSPTLLSTPRPFSLELIGQDAAGRRLHRAAPQPSTVVPVLLELSGPSGFLAPGSKVPLSLRIASFSGPQDLDLRTFVNPSFSLTSNLSRAHLELNESAWGRLWLEVPDSAAPDSVVMVTVTAGGREANPVPPTHAFLRLLVSAPAPQDRHTTPTGSSDPILTTATPAFSPFTLVAQGRAGAGLAAGSPWWGTVGGVLLLLGLASW

SEQ ID NO: 99636 - protein, 329 aa, Homo sapiens
MMSHPCVSLLGVPVLNPALVPHLAQGQVLLVSDPSPNTDPAKYSESTSATRHQMKGEDAQPQEMASTSFPRASGPSPEFRQHGDSDGKRGSPQNLPIEHHFACKECGDTFRLKVLLVQHQRVHSEEKGWECGDCGKVFRGVAEFNEHRKSHVAAEPQPGPSRALENAAEKREQMEREAKPFECEECGKRFKKNAGLSQHLRVHSREKPFDCEECGRSFKVNTHLFRHQKLHTSEKPFACKACSRDFLDRQELLKHQRMHTGHLPFDCDDCGKSFRGVNGLAEHQRIHSGAKPYGCPHCGKLFRRSSELTKHRRIHTGEKPYACGLPWAL

SEQ ID NO: 99637 - protein, 138 aa, Homo sapiens
MAGSEELGLREDTLRVLAAFLRRGEAAGSPVPTPPRSPAQEEPTDFLSRLRRCLPCSLGRGAAPSESPRPCSLPIRPCYGLEPGPATPDFYALVAQRLEQLVQEQLKSPPSPGGHPGCFTRGLELAIGLSSFSEAATR

SEQ ID NO: 99638 - protein, 238 aa, Homo sapiens
MTEDSQRNFRSVYYEKVGFRGVEEKKSLEILLKDDRLGILPPHHESHAKVMMYRKEQYLDVLHALKVVRFVSDATPQAEVYLRMYQLESGKLPRSPSFPLEPDDEVFLAIAKAMEEMVEDSVDCYWITRRFVNQLNTKYRDSLPQLPKAFEQYLNLEDGRLLTHLRMCSAAPKLPYDLWFKRCFAGCLPESSLQRVWDKVVSGSCKILVFVAVEILLTFKIKVMALNSAEKITKFLEN

SEQ ID NO: 99639 - protein, 184 aa, Homo sapiens
MKTILGFKGLFYLHSLIWTCAGDWSAIQVHCTQFWFFARIKPTIFYNLYVNPDEVFLGDGCHVTHVLPNVYYEFFYHPHDCGIVTQPLQEVLLLKTKIRYISRDSTVRSEMPLSCVVHNQHHLLNAVEMRDGETDNVNEWEIEVRIHIANEDMGSNFCNTILVLKVKVIFRYLLIFISRTLPRR

SEQ ID NO: 99640 - protein, 276 aa, Homo sapiens
MHAPFRISCQVVWLFKIYLLMCQINSALTSFHTALELAVDQREIQHVCLYEIGWCSMIELNFKDAFDSFERLKNESRWSQCYYAYLTAVCQGATGDVDGAQIVFKEVQKLFKRKNNQIEQFSVKKAERFRKQTPTKALCVLASIEVLYLWKALPNCSFPNLQRMSQACHEVDDSSVVGLKYLLLGAIHKCLGNSEDAVQYFQRAVKDELCRQNNLYVQPYACYELGCLLLDKPETVGRGRALLLQAKEDFSGYDFENRLHVRIHAALASLRELVPQ

SEQ ID NO: 99641 - protein, 77 aa, Homo sapiens
MDTTAAAALPAFVALLLLSPWPLLGSAQGQFSAVSVLVVGNFCCCCSAAVCHSIRHLSRTQNPGQDHEGRLKRWLYF

SEQ ID NO: 99642 - protein, 263 aa, Homo sapiens
MAADVVGDVYVLVEHPFEYTGKDGRRVAIRPNERYRLLRRSTEHWWHVRREPGGRPFYLPAQYVRELPALGNPAAAAPPGPHPSPAAPEPLAYDYRFVSAAATAGPDGAPEESGGRTSSLCGPAQRGAATQRSSLAPGLPACLYLRPAAPVRPAQSLNDLACAAVSPPAGLLGSSGSFKACSVAGSWVCPRPLARSDSENVYEVIQDLHVPPREESAEQVPPRALGRGGGWRARDRARTEPGRKETRSAQRRARRPPLSEDFG

SEQ ID NO: 99643 - protein, 81 aa, Homo sapiens
MTAAVFFGCAFIAFGPALALYVFTIATEPLRIIFLIAGRRVETCKNTEAPDCASPSGSLSFLLVGVSTDFVPCLVHGKSHY

SEQ ID NO: 99644 - protein, 481 aa, Homo sapiens
MKSDCMQTTICQERKKDPIEMFHSGQLVKVCAPMVRYSKLAFRTLVRKYSCDLCYTPMIVAADFVKSIKARDSEFTTNQGDCPLIVQFAANDARLLSDAARIVCPYANGIDINCGCPQRWAMAEGYGACLINKPELVQDMVKQVRNQVETPGFSVSIKIRIHDDLKRTVDLCQKAEATGVSWITVHGRTAEERHQPVHYDSIKIIKENMSIPVIANGDIRSLKEAENVWRITGTDGVKKKMTLQWAAVATFLYAEIGLILIFCLPFIPPQRWQKIFSFNVWGKIATFWNKAFLTIIILLIVLFLDAVREVRKYSSVHTIEKSSTSRPDAYEHTQMKLFRSQRNLYISGFSLFFWLVLRRLVTLITQLAKELSNKGVLKTQAENTNKAAKKFMEENEKLKRILKSHGKDEECVLEAENKKLVEDQEKLKTELRKTSDALSKAQNDVMEMKMQSERLSKEYDQLLKEHSELQDRLERGNKKRL

SEQ ID NO: 99645 - protein, 151 aa, Homo sapiens
MSRRKQSNPRQIKRSLGDMEAREEVQLVGASHMEQKATAPEAPSPPSADVNSPPPLPPPTSPGGPKELEGQEPEPRPTEEEPGSPWSGPDELEPVVQDGQRRIRARLSLATGLSWGPFHGSVQTRASSPRQAEPRGAISALAPSVQTHRTR

SEQ ID NO: 99646 - protein, 410 aa, Homo sapiens
MSLMVVSMACVGFFLLEGPWPHVGGQDKPFLSAWPGTVVSEGQHVTLQCRSRLGFNEFSLSKEDGMPVPELYNRIFRNSFLMGPVTPAHAGTYRCCSSHPHSPTGWSAPSNPVVIMVTGVHRKPSLLAHPGPLVKSGETVILQCWSDVRFERFLLHREGITEDPLRLVGQLHDAGSQVNYSMGPMTPALAGTYRCFGSVTHLPYELSAPSDPLDIVVVGLYGKPSLSAQPGPTVQAGENVTLSCSSRSLFDIYHLSREAEAGELRLTAVLRVNGTFQANFPLGPVTHGGNYRCFGSFRALPHAWSDPSDPLPVSVTGNSRNLHVLIGTSVVIIPFAILLFFLLHRWCANKKNAVVMDQEPAGNRTVNREDSDEQDPQEVTYAQLNHCVFTQRKITRPSQRPKTPPTDTSV

SEQ ID NO: 99647 - protein, 242 aa, Homo sapiens
MLVVEVANGRSLVWGAEAVQALRERLGVGGRTVGALPRGPRQNSRLGLPLLLMPEEARLLAEIGAVTLVSAPRPDSRHHSLALTSFKRQQEESFQEQSALAAEARETRRQELLEKITEGQAAKKQKLEQASGASSSQEAGSSQAAKEDETSDGQASGEQEEAGPSSSQAGPSNGVAPLPRSALLVQLATARPRPVKARPLDWRVQSKDWPHAGRPAHELRYSIYRDLWERGFFLSAAGKFGG

SEQ ID NO: 99648 - protein, 318 aa, Homo sapiens
MSFNLQSSKKLFIFLGKSLFSLLEAMIFALLPKPRKNVAGEIVLITGAGSGLGRLLALQFARLGSVLVLWDINKEGNEETCKMAREAGATRVHAYTCDCSQKEGVYRVADQVKKEVGDVSILINNAGIVTGKKFLDCPDELMEKSFDVNFKAHLWTYKAFLPAMIANDHGHLVCISSSAGLSGVNGLADYCASKFAAFGFAESVFVETFVQKQKGIKTTIVCPFFIKTGMFEGCTTGCPSLLPILEPKYAVEKIVEAILQEKMYLYMPKLLYFMMFLKRLHLAQDGSECLTEAMWDRAKDPGQAIRNSGLRSHYSLSL

SEQ ID NO: 99649 - protein, 112 aa, Homo sapiens
MDEPSPLAQPLELNQHSRFIIGSVSEDNSEDEISNLVKLDLLEEKEGSLSPASVGSDTLSDLGISSLQDGLALHISSWIKRSGSVVLGSHCSSESPRGALGDKPHPQRFRFI

SEQ ID NO: 99650 - protein, 93 aa, Homo sapiens
MWPLALVIASLTLALSGGEDFKEPSQGPRDVMAASRPEAFPKGLTLEPRPEKGGICGCLAPGTILGLKVGWLFSSGDTPWIHARATPECHTLG

SEQ ID NO: 99651 - protein, 698 aa, Homo sapiens
MAACGRVRRMFRLSAALHLLLLFAAGAEKLPGQGVHSQGQGPGANFVSFVGQAGGGGPAGQQLPQLPQSSQLQQQQQQQQQQQQPQPPQPPFPAGGPPARRGGAGAGGGWKLAEEESCREDVTRVCPKHTWSNNLAVLECLQDVREPENEISSDCNHLLWNYKLNLTTDPKFESVAREVCKSTITEIKECADEPVGKGYMVSCLVDHRGNITEYQCHQYITKMTAIIFSDYRLICGFMDDCKNDINILKCGSIRLGEKDAHSQGEVVSCLEKGLVKEAEEREPKIQVSELCKKAILRVAELSSDDFHLDRHLYFACRDDRERFCENTQAGEGRVYKCLFNHKFEESMSEKCREALTTRQKLIAQDYKVSYSLAKSCKSDLKKYRCNVENLPRSREARLSYLLMCLESAVHRGRQVSSECQGEMLDYRRMLMEDFSLSPEIILSCRGEIEHHCSGLHRKGRTLHCLMKVVRGEKGNLGMNCQQALQTLIQETDPGADYRIDRALNEACESVIQTACKHIRSGDPMILSCLMEHLYTEKMVEDCEHRLLELQYFISRDWKLDPVLYRKCQGDASRLCHTHGWNETSEFMPQGAVFSCLYRHAYRTEEQGRRLSRECRAEVQRILHQRAMDVKLDPALQDKCLIDLGKWCSEKTETGQELECLQDHLDDLVVECRDIVGNLTELESEAEREYVFKNLPFKV

SEQ ID NO: 99652 - protein, 62 aa, Homo sapiens
MPAVASVPKELYLSSSLKDLNKKTEVKPEKISTKRIISIQYLDLETSKKLSKKLKDSLKALN

SEQ ID NO: 99653 - protein, 49 aa, Homo sapiens
MDPSMGVNSVTISVEGMTCNSCVWTIEQQIGKVNGVHHIKSVKMVNYTD

SEQ ID NO: 99654 - protein, 241 aa, Homo sapiens
MSSEQKSQHCKPEEGVEAQEEALGLVGAQAPTTEEQEAAVSSSSPLVPGTLEEVPAAESAGPPQSPQGASALPTTISFTCWRQPNEGSSSQEEEGPSTSPDAESLFREALSNKVDELAHFLLRKYRAKELVTKAEMLERVIKNYKRCFPVIFGKASESLKMIFGIDVKEVDPASNTYTLVTCLGLSYDGLLGNNQIFPKTGLLIIVLGTIAMEGDSASEEEIWEELGVMGVYDGREHTVYG

SEQ ID NO: 99655 - protein, 114 aa, Homo sapiens
MQMYSRQLASTEWLTIQGGLLGSGLFVFSLTAFNNLENLVFGKGFQAKIFPEILLCLLLALFASGLIHRVCVTTCFIFSMVGLYYINKISSTLYQAAAPVLTPAKVTGKSKKRN

SEQ ID NO: 99656 - protein, 684 aa, Homo sapiens
MAEHPPLLDTTQILSSDISLLSAPIVSADGTQQVILVQVNPGEAFTIRREDGQFQCITGPAQVPMMSPNGSVPPIYVPPGYAPQVIEDNGVRRVVVVPQAPEFHPGSHTVLHRSPHPPLPGFIPVPTMMPPPPRHMYSPVTGAGDMTTQYMPQYQSSQVYGDVDAHSTHGRSNFRDERSSKTYERLQKKLKDRQGTQKDKMSSPPSSPQKCPSPINEHNGLIKGQIAGGINTGSAKIKSGKGKGGTQVDTEIEEKDEETKAFEALLSNIVKPVASDIQARTVVLTWSPPSSLINGETDESSVPELYGYEVLISSTGKDGKYKSVYVGEETNITLNDLKPAMDYHAKVQAEYNSIKGTPSEAEIFTTLSCEPDIPNPPRIANRTKNSLTLQWKAPSDNGSKIQNFVLEWDEGKGNGEFCQCYMGSQKQFKITKLSPAMGCKFRLSARNDYGTSGFSEEVLYYTSGCAPSMPASPVLTKAGITWLSLQWSKPSGTPSDEGISYILEMEEETSGYGFKPKYDGEDLAYTVKNLRRSTKYKFKVIAYNSEGKSNPSEVVEFTTCPDKPGIPVKPSVKGKIHSHSFKITWDPPKDNGGATINKYVVEMAEGSNGNKWEMIYSGATREHLCDRLNPGCFYRLRVYCISDGGQSAVSESLLVQTPAVPPGPCLPPRLQGRPKAKEIQTPSG

SEQ ID NO: 99657 - protein, 70 aa, Homo sapiens
MISPGLCQQNSQELLEPKTHLSETDVRQAAKACPSTPESREKTSGATQTTVGDALFTRHKPLNPPIKKSE

SEQ ID NO: 99658 - protein, 269 aa, Homo sapiens
MEREMEDLPRPSISAEPGTVIPLGSHVTFVCRGPVGVQTFRLERESRSTYNDTEDVSQASPSESEARFRIDSVSEGNAGPYRCIYYKPPKWSEQSDYLELLVKETSGGPDSPDTEPGSSAGPTQRPSDNSHNEHAPASQGLKAEHLYILIGVSVVFLFCLLLLVLFCLHRQNQIKQGPPRSKDEEQKPQQRPDLAVDVLERTADKATVNGLPEKDRETDTSALAAGSSQEVTYAQLDHWALTQRTARAVSPQSTKPMAESITYAAVARH

SEQ ID NO: 99659 - protein, 401 aa, Homo sapiens
MFYFRGCGRWVAVSFTKQQFPLARLSSDSAAPRTPHFDVIVIGGGHAGTEAATAAARCGSRTLLLTHRVDTIGQMSCNPSFGGIGKGHLMREVDALDGLCSRICDQSGVHYKVLNRRKGPAVWGLRAQIDRKLYKQNMQKEILNTPLLTVQEGAVEDLILTEPEPEHTGKCRVSGVVLVDGSTVYAESVILTTGTFLRGMIVIGLETHPAGRLGDQPSIGLAQTLEKLGFVVGRLKTGTPPRIAKESINFSILNKHIPDNPSIPFSFTNETVWIKPEDQLPCYLTHTNPRVDEIVLKNLHLNSHVKETTRGPRYCPSIESKVLRFPNRLHQVWLEPEGMDSDLIYPQGLSMTLPAELQEKMITCIRGLEKAKVIQPGWSAMVRSRLTTTSPCQATVFSMIT

SEQ ID NO: 99660 - protein, 729 aa, Homo sapiens
MFPPSGSTGLIPPSHFQARPLSTLPRMAPTWLSDIPLVQPPGHQDVSERRLDTQRPQVTMWERDVSSDRQEPGRRGRSWGLEGSQALSQQAEVIVRQLQELRRLEEEVRLLRETSLQQKMRLEAQAMELEALARAEKAGRAEAEGLRAALAGAEVVRKNLEEGSQRELEEVQRLHQEQLSSLTQAHEEALSSLTSKAEGLEKSLSSLETRRAGEAKELAEAQREAELLRKQLSKTQEDLEAQVTLVENLRKYVGEQVPSEVHSQTWELERQKLLETMQHLQEDRDSLHATAELLQVRVQSLTHILALQEEELTRKVQPSDSLEPEFTRKCQSLLNRWREKVFALMVQLKAQELEHSDSVKQLKGQVASLQEKVTSQSQEQAILQRSLQDKAAEVEVERMGAKGLQLELSRAQEARRRWQQQTASAEEQLRLVVNAVSSCPLPPPVTDVSLELQQLREERNRLDAELQLSARLIQQEVGRAREQGEAERQQLSKVAQQLEQELQQTQESLASLGLQLEVARQGQQESTEEAASLRQELTQQQELYGQALQEKVAEVETRLREQLSDTERRLNEARREHAKAVVSLRQIQRRAAQEKERSQELRRLQEEARKEEGQRLARRLQELERDKNLMLATLQQEGLLSRYKQQRLLTVLPSLLDKKKSVVSSPRPPECSASAPVAAAVPTRESIKGSLSVLLDDLQDLSEAISKEEAVCQGDNLDRCSSSNPQMSS

SEQ ID NO: 99661 - protein, 718 aa, Homo sapiens
MPPPSDIVKVAIEWPGANAQLLEIDQKRPLASIIKEVCDGWSLPNPEYYTLRYADGPQLYITEQTRSDIKNGTILQLAISPSRAARQLMERTQSSNMETRLDAMKELAKLSADVTFATEFINMDGIIVLTRLVESGTKLLSHEMLAFTLTAFLELMDHGIVSWDMVSITFIKQIAGYVSQPMVDVSILQRSLAILESMVLNSQSLYQKIAEEITVGQLISHLQVSNQEIQTYAIALINALFLKAPEDKRQDMANAFAQKHLRSIILNHVIRGNRPIKTEMAHQLYVLQVLTFNLLEERMMTKMDPNDQAQRDIIFELRRIAFDAESDPSNAPGSGTEKRKAMYTKDYKMLGFTNHINPAMDFTQTPPGMLALDNMLYLAKVHQDTYIRIVLENSSREDKHECPFGRSAIELTKMLCEILQVGELPNEGRNDYHPMFFTHDRAFEELFGICIQLLNKTWKEMRATAEDFNKVMQVVREQITRALPSKPNSLDQFKSKLRSLSYSEILRLRQSERMSQDDFQSPPIVELREKIQPEILELIKQQRLNRLCEGSSFRKIGNRRRQERFWYCRLALNHKVLHYGDLDDNPQGEVTFESLQEKIPVADIKAIVTGKDCPHMKEKSALKQNKEVLELAFSILYDPDETLNFIAPNKYEYCIWIDGLSALLGKDMSSELTKSDLDTLLSMEMKLRLLDLENIQIPEAPPPIPKEPSSYDFVYHYG

SEQ ID NO: 99662 - protein, 263 aa, Homo sapiens
MAHRKLESVGSGMLDHRVRPGPVPHSQEPESEDMELPLEGYVPEGLELAALRPESPAPEEQECHNHSPDGDSSSDYVNNTSEEEDYDEGLPEEEEGITYYIRYCPEDDSYLEGMDCNGEEYLAHSAHPVDTDECQEAVEEWTDSAGPHPHGHEAEGSQDYPDGQLPIPEDEPSVLEAHDQEEDGHYCASKEGYQDYYPEEANGNTGASPYRLRRGDGDLEDQEEDIDQIVAEIKMSLSMTSITSASEASPEHGPEPGPEDSVE

SEQ ID NO: 99663 - protein, 35 aa, Homo sapiens
MAATGTAAAAATGRLLLLLLVGLTAPALALAGYIE

SEQ ID NO: 99664 - protein, 71 aa, Homo sapiens
MAKFVIRPATAADCSDILRLIKELAKYEYMEEQVILTEKDLLEDGFGEHPFYHCLVAEVPKEHWTPEGYSL

SEQ ID NO: 99665 - protein, 1267 aa, Homo sapiens
MRGLPRGRGLMRARGRGRAAPPGSRGRGRGGPHRGRGRPRSLLSLPRAQASWTPQLSTGLTSPPVPCLPSQGEAPAEMGALLLEKETRGATERVHGSLGDTPRSEETLPKANPDSLEPAGPSSPASVTVTVGDEGADTPVGATPLIGDESENLEGDGDLRGGRILLGHATKSFPSSPSKGGSCPSRAKMSMTGAGKSPPSVQSLAMRLLSMPGAQGAAAAGSEPPPATTSPEGQPKVHRARKTMSKPGNGQPPVPEKRPPEIQHFRMSDDVHSLGKVTSDLAKRRKLNSGGGLSEELGSARRSGEVTLTKGDPGSLEEWETVVGDDFSLYYDSYSVDERVDSDSKSEVEALTEQLSEEEEEEEEEEEEEEEEEEEEEEEEDEESGNQSDRSGSSGRRKAKKKWRKDSPWVKPSRKRRKREPPRAKEPRGVNGVGSSGPSEYMEVPLGSLELPSEGTLSPNHAGVSNDTSSLETERGFEELPLCSCRMEAPKIDRISERAGHKCMATESVDGELSGCNAAILKRETMRPSSRVALMVLCETHRARMVKHHCCPGCGYFCTAGTFLECHPDFRVAHRFHKACVSQLNGMVFCPHCGEDASEAQEVTIPRGDGVTPPAGTAAPAPPPLSQDVPGRADTSQPSARMRGHGEPRRPPCDPLADTIDSSGPSLTLPNGGCLSAVGLPLGPGREALEKALVIQESERRKKLRFHPRQLYLSVKQGELQKVILMLLDNLDPNFQSDQQSKRTPLHAAAQKGSVEICHVLLQAGANINAVDKQQRTPLMEAVVNNHLEVARYMVQRGGCVYSKEEDGSTCLHHAAKIGNLEMVSLLLSTGQVDVNAQDSGGWTPIIWAAEHKHIEVIRMLLTRGADVTLTDNEENICLHWASFTGSAAIAEVLLNARCDLHAVNYHGDTPLHIAARESYHDCVLLFLSRGANPELRNKEGDTAWDLTPERSDVWFALQLNRKLRLGVGNRAIRTEKIICRDVARGYENVPIPCVNGVDGEPCPEDYKYISENCETSTMNIDRNITHLQHCTCVDDCSSSNCLCGQLSIRCWYDKDGRLLQEFNKIEPPLIFECNQACSCWRNCKNRVVQSGIKVRLQLYRTAKMGWGVRALQTIPQGTFICEYVGELISDAEADVREDDSYLFDLDNKDGEVYCIDARYYGNISRFINHLCDPNIIPVRVFMLHQDLRFPRIAFFSSRDIRTGEELGFDYGDRFWDIKSKYFTCQCGSEKCKHSAEAIALEQSRLARLDPHPELLPELGSLPPVNT

SEQ ID NO: 99666 - protein, 734 aa, Homo sapiens
MDSTLTASEIRQRFIDFFKRNEHTYVHSSATIPLDDPTLLFANAGMNQFKPIFLNTIDPSHPMAKLSRAANTQKCIRAGGKHNDLDDVGKDVYHHTFFEMLGSWSFGDYFKELACKMALELLTQEFGIPIERLYVTYFGGDEAAGLEADLECKQIWQNLGLDDTKILPGNMKDNFWEMGDTGPCGPCSEIHYDRIGGRDAAHLVNQDDPNVLEIWNLVFIQYNREADGILKPLPKKSIDTGMGLERLVSVLQNKMSNYDTDLFVPYFEAIQKGTGARPYTGKVGAEDADGIDMAYRVLADHARTITVALADGGRPDNTGRGYVLRRILRRAVRYAHEKLNASRGFFATLVDVVVQSLGDAFPELKKDPDMVKDIINEEEVQFLKTLSRGRRILDRKIQSLGDSKTIPGDTAWLLYDTYGFPVDLTGLIAEEKGLVVDMDGFEEERKLAQLKSQGKGAGGEDLIMLDIYAIEELRARGLEVTDDSPKYNYHLDSSGSYVFENTVATVMALRREKMFVEEVSTGQECGVVLDKTCFYAEQGGQIYDEGYLVKVDDSSEDKTEFTVKNAQVRGGYVLHIGTIYGDLKVGDQVWLFIDEPRRRPIMSNHTATHILNFALRSVLGEADQKGSLVAPDRLRFDFTAKGAMSTQQIKKAEEIANEMIEAAKAPAELESCRSFCDRDGRSHCQGYPEDCGCHRCRGPEGPQESRELEEMSLCHGSQSEGSDCSKQGCAEGDR

SEQ ID NO: 99667 - protein, 149 aa, Homo sapiens
MTPGTQSPFFLLLLLTVLTVVTGSGHASSTPGGEKETSATQRSSVPSSTEKNAFNSSLEDPSTDYYQELQRDISEMFLQIYKQGGFLGLSNIKFSLGLGCQAGASRCWCWSVFWLRWPLSISLPWLSVSAAERTTGSWTSFQPGIPTIL

SEQ ID NO: 99668 - protein, 211 aa, Homo sapiens
MAEASSANLGSGCEEKRHEGSSSESVPPGTTISRVKLLDTMVDTFLQKLVAAGSYQRFTDCYKCFYQLQPAMTQQIYDKFIAQLQTSIREEISDIKEEGNLEAVLNALDKIVEEGKVRKEPAWRPSGIPEKDLHSVMAPYFLQQRDTLRRHVQKQEAENQQLADAVLAGRRQVEELQLQVQAQQQAWQVRSPAVQSPAKVQPLCPSRRAAR

SEQ ID NO: 99669 - protein, 120 aa, Homo sapiens
MHRRRLALGLGFCLLAGTSLSVLWVYLENWLPVSYVPYYLPCPEIFNMKLHYKREKPLQPVVWSQYPQPKLLEHRPTQLLTLTPWLAPIVSEGTFNPELLQHIYQPLNLTIGVTVFAVGK

SEQ ID NO: 99670 - protein, 261 aa, Homo sapiens
MKMMLVRRFRVLILMVFLVACALHIALDLLPRLERRGARPSGEPGCSCAQPAAEVAAPGWAQVRGRPGEPPAASSAAGDAGWPNKHTLRILQDFSSDPSSNLSSHSLEKLPPAAEPAERALRGRDPGALRPHDPAHRPLLRDPGPRRSESPPGPGGDASLLARLFEHPLYRVAVPPLTEEDVLFNVNSDTRLSPKAAENPDWPHAGAEGAEFLSPGEAAVDSYPNWLKFHIGINRYELYSRHNPAIEALLHDLSSQRITSV

SEQ ID NO: 99671 - protein, 82 aa, Homo sapiens
MSRRRHSDENDGGQPHKRRKTSDANETEDHLESLICKVGEKSACSLESNLEGLAGVLEADLPNYKSKILRLLCTVSVFYLIL

SEQ ID NO: 99672 - protein, 5043 aa, Homo sapiens
  MOD_RES (1)..(1): Any amino acid
XTTEDTLITGSKTAAPVTSTGSTTATLEGQSTAASSRTSNQDISASSQNHQTKSTETTSKAQTDTLTQMMTSTLFSSPSVHNVMETAPPDEMTTSFPSSVTNTLMMTSKTITMTTSTDSTLGNTEETSTAGTESSTPVTSAVSITAGQEGQSRTTSWRTSIQDTSASSQNHWTRSTQTTRESQTSTLTHRTTSTPSFSPSVHNVTGTVSQKTSPSGETATSSLCSVTNTSMMTSEKITVTTSTGSTLGNPGETSSVPVTGSLMPVTSAALVTFDPEGQSPATFSRTSTQDTTAFSKNHQTQSVETTRVSQINTLNTLTPVTTSTVLSSPSGFNPSGTVSQETFPSGETTTSSPSSVSNTFLVTSKVFRMPTSRDSTLGNTEETSLSVSGTISAITSKVSTIWWSDTLSTALSPSSLPPKISTAFHTQQSEGAETTGRPHERSSFSPGVSQEIFTLHETTTWPSSFSSKGHTTWSQTELPSTSTGAATRLVTGNPSTGTAGTIPRVPSKVSAIGEPGEPTTYSSHSTTLPKTTGAGAQTQWTQETGTTGEALLSSPSYSVTQMIKTATSPSSSPMLDRHTSQQITTAPSTNHSTIHSTSTSPQESPAVSQRGHTQAPQTTQESQTTRSVSPMTDTKTVTTPGSSFTASGHSPSEIVPQDAPTISAATTFAPAPTGDGHTTQAPTTALQAAPSSHDATLGPSGGTSLSKTGALTLANSVVSTPGGPEGQWTSASASTSPDTAAAMTHTHQAESTEASGQTQTSEPASSGSRTTSAGTATPSSSGASGTTPSGSEGISTSGETTRFSSNPSRDSHTTQSTTELLSASASHGAIPVSTGMASSIVPGTFHPTLSEASTAGRPTGQSSPTSPSASPQETAAISRMAQTQRTRTSRGSDTISLASQATDTFSTVPPTPPSITSTGLTSPQTETHTLSPSGSGKTFTTALISNATPLPVTYASSASTGHTTPLHVTDASSVSTGHATPLPVTSPSSVSTGHTTPLPVTDTSSESTGHVTPLPVTSFSSASTGDSTPLPVTDTSSASTGHVTPLPVTSLSSASTGDTTPLPVTDTSSASTGHATSLPVTDTSSVSTGHTTPLPVTDTSSASTGHATSLPVTDTSSVSTGHTTPLHVTDASSASTGQATPLPVTSLSSVSTGDTTPLPVTSPSSASTGHATPLLVTDTSSASTGHATPLPVTDASSVSTDHATSLPVTIPSAASTGHTTPLPVTDTSSASTGQATSLLVTDTSSVSTGDTTPLPVTSTSSASTGHVTPLHVTSPSSASTGHATPLPVTSLSSASTGDTMPLPVTSPSSASTGDTTPLPVTDASSVSTGHTTPLHVTDASSASTGQATPLPVTSLSSVSTGDTTPLPVTSPSSASTGHATPLLVTDTSSASTGHATPLPVTDASSVSTDHATSLPVTIPSAASTGHTTPLPVTDTSSASTGQATSLLVTDTSSVSTGDTTPLPVTSTSSASTGHVTPLHVTSPSSASTGHATPLPVTSLSSASTGDTMPLPVTSPSSASTGDTTPLPVTDASSVSTGHTTPLPVTSPSSASTGHTTPLPVTDTSSASKGDTTPLPVTSPSSASTGHTTPLPVTDTSSASTGDTTPLPVTNASSLSTGHATPLHVTSPSSASTGHATPLPVTSTSSASTGHATPLPVTGLSSATTDDTTRLPVTDVSSASTGQATPLPVTSLSSVSTGDTTPLPVTSPSSASTGHASPLLVTDASSASTGQATPLPVTDTSSVSTAHATPLPVTGLSSASTDDTTRLPVTDVSSASTGQAIPLPVTSPSSASTGDTTPLPVTDASSASTGDTTSLPVTIPSSASSGHTTSLPVTDASSVSTGHATSLLVTDASSVSTGDTTPLPVTDTNSASTGDTTPLHVTDASSVSTGHATSLPVTSLSSASTGDTTPLPVTSPSSASSGHTTPLPVTDASSVPTGHATSLPVTDASSVSTGHATPLPVTDASSVSTGHATPLPVTDTSSVSTGQATPLPVTSLSSASTGDTTPLPVTDTSSASTGQDTPLPVTSLSSVSTGDTTPLPVTNPSSASTGHATPLLVTDASSISTGHATSLLVTDASSVSTGHATALHDTDASSLSTGDTTPLPVTSPSSTSTGDTTPLPVTETSSVSTGHATSLPVTDTSSASTGHATSLPVTDTSSASTGHATPLPVTDTSSASTGQATPLPVTSPSSASTGHAIPLLVTDTSSASTGQATPLPVTSLSSASTGDTTPLPVTDASSVSTGHATSLPVTSLSSVSTGDTTPLPVTSPSSASTGHATPLHVTDASSASTGHATPLPVTSLSSASTGDTTPLPVTSPSSASTGHATPLHVTDASSVSTGDTTPLPVTSSSSASSGHTTPLPVTDASSASTGDTTPLPVTDTSSASTGHATHLPVTGLSSASTGDTTRLPVTNVSSASTGHATPLPVTSTSSASTGDTTPLPGTDTSSVSTGHTTPLLVTDASSVSTGDTTRLPVTSPSSASTGHTTPLPVTDTPSASTGDTTPLPVTNASSLSTRHATSLHVTSPSSASTGHATSLPVTDTSAASTGHATPLPVTSTSSASTGDTTPLPVTDTYSASTGQATPLPVTSLSSVSTGDTTPLPVTSPSSASTGHATPLLVTDASSASTGQATPLPVTSLSSVSTGDTTPLPVTSPSSASTGHATSLPVTDTSSASTGDTTSLPVTDTSSAYTGDTTSLPVTDTSSSSTGDTTPLLVTETSSVSTGDTTPLPVTDTSSASTGHATPLPVTNTSSVSTGHATPLHVTSPSSASTGHTTPLPVTDASSVSTGHATSLPVTDASSVFTGHATSLPVTIPSSASSGHTTPLPVTDASSVSTGHATSLPVTDASSVSTGHATPLPVTDASSVSTGHATPLPLTSLSSVSTGDTTPLPVTDTSSASTGQATPLPVTSLSSVSTGDTTPLPVTDTSSASTGHATSLPVTDTSSASTGHATPLPDTDTSSASTGHATLLPVTDTSSASIGHATSLPVTDTSSISTGHATPLHVTSPSSASTGHATPLPVTDTSSASTGHANPLHVTSPSSASTGHATPLPVTDTSSASTGHATPLPVTSLSSVSTGDTTPLPVTSPSSASTGHTTPLPVTDTSSASTGQATALPVTSTSSASTGDTTPLPVTDTSSASTGQATPLPVTSLSSVSTGDTTPLPVTSPSSASTGHATPLLVTDASSASTGQATPLPVTSLSSVSTGDTTPLPVTSPSSASTGHATSLPVTDTSSASTGDTTSLPVTDTSSAYTGDTTSLPVTDTSSSSTGDTTPLLVTETSSVSTGHATPLLVTDASSASTGHATPLHVTSPSSASTGDTTPVPVTDTSSVSTGHATPLPVTGLSSASTGDTTRLPVTDISSASTGQATPLPVTNTSSVSTGDTMPLPVTSPSSASTGHATPLPVTSTSSASTGHATPVPVTSTSSASTGHTTPLPVTDTSSASTGDTTPLPVTSPSSASTGHTTPLHVTIPSSASTGDTSTLPVTGASSASTGHATPLPVTDTSSVSTGHATPLPVTSLSSVSTGDTTPLPVTDASSASTGQATPLPVTSLSSVSTGDTTPLLVTDASSVSTGHATPLPVTDTSSASTGDTTRLPVTDTSSASTGQATPLPVTSLSSVSTGDTTPLLVTDASSVSTGHATPLPVTDTSSASTGDTTRLPVTDTSSASTGQATPLPVTIPSSSSSGHTTPLPVTSTSSVSTGHVTPLHVTSPSSASTGHVTPLPVTSTSSASTGHATPLLVTDASSVSTGHATPLPVTDASSASTGDTTPLPVTDTSSASTGQATPLPVTSLSSVSTGDTTPLPVTDASSASTGHATPLPVTIPSSVSTGDTMPLPVTSPSSASTGHATPLPVTGLSSASTGDTTPLPVTDTSSASTRHATPLPVTDTSSASTDDTTRLPVTDVSSASTGHATPLPVTSTSSASTGDTTPLPVTDTSSVSTGHATSLPVTSRSSASTGHATPLPVTDTSSVSTGHATPLPVTSTSSVSTGHATPLPVTSPSSASTGHATPVPVTSTSSASTGDTTPLPVTNASSLSTGHATPLHVTSPSSASRGDTSTLPVTDASSASTGHATPLPLTSLSSVSTGDTTPLPVTDTSSASTGQATPLPVTSLSSVSTGDTTPLPVTIPSSASSGHTTSLPVTDASSVSTGHGTPLPVTSTSSASTGDTTPLPVTDTSSASTGHATPLPVTDTSSASTGHATPLPVTSLSSVSTGHATPLAVSSATSASTVSSDSPLKMETPGMTTPSLKTDGGRRTATSPPPTTSQTIISTIPSTAMHTRSTAAPIPILPERGVSLFPYGAGAGDLEFVRRTVDFTSPLFKPATGFPLGSSLRDSLYFTDNGQIIFPESDYQIFSYPNPLPTGFTGRDPVALVAPFWDDADFSTGRGTTFYQEYETFYGEHSLLVQQAESWIRKMTNNGGYKARWALKVTWVNAHAYPAQWTLGSNTYQAILSTDGSRSYALFLYQSGGMQWDVAQRSGNPVLMGFSSGDGYFENSPLMSQPVWERYRPDRFLNSNSGLQGLQFYRLHREERPNYRLECLQWLKSQPRWPSWGWNQVSCPCSWQQGRRDLRFQPVSIGRWGLGSRQLCSFTSWRGGVCCSYGPWGEFREGWHVQRPWQLAQELEPQSWCCRWNDKPYLCALYQQRRPHVGCATYRPPQPAWMFGDPHITTLDGVSYTFNGLGDFLLVGAQDGNSSFLLQGRTAQTGSAQATNFIAFAAQYRSSSLGPVTVQWLLEPHDAIRVLLDNQTVTFQPDHEDGGGQETFNATGVLLSRNGSEVSASFDGWATVSVIALSNILHASASLPPEYQNRTEGLLGVWNNNPEDDFRMPNGSTIPPGSPEEMLFHFGMTWQINGTGLLGKRNDQLPSNFTPVFYSQLQKNSSWAEHLISNCDGDSSCIYDTLALRNASIGLHTREVSKNYEQANATLNQYPPSINGGRVIEAYKGQTTLIQYTSNAEDANFTLRDSCTDLELFENGTLLWTPKSLEPFTLEILARSAKIGLASALQPRTVVCHCNAESQCLYNQTSRVGNSSLELWGALSCVRTSPAL

SEQ ID NO: 99673 - protein, 38 aa, Homo sapiens
MGSGWVPWVVALLVNLTRLDSSMTQGTDSPVMWGCLWH

SEQ ID NO: 99674 - protein, 72 aa, Homo sapiens
MRLLLALLGVLLSVPGPPVLSLEASEEVELASIHLSLCLRERTGLAGRRALSWAAELVSPAWLPAWSSKSRS

SEQ ID NO: 99675 - protein, 147 aa, Homo sapiens
  MOD_RES (1)..(1): Any amino acid
XRFLGGFPGSSKQVSSGRLQARAVSCLLLETTAAHAHRMAATFQLPGHQEMPLTFQDVAVYFSQAEGRQLGPQQRALYRDVMLENYGNVASLGFPVPKPELISQLEQGKELWVLNLLGAEEPDILKSCQKGENGWDANPGSSLPILP

SEQ ID NO: 99676 - protein, 105 aa, Homo sapiens
MNVKGKVILSMLVVSTVIIVFWEFINSTEGSFLWIYHSKNPEVDDSSAQKGWWFLSWFNNGIHNYQQGEEDIDKEKGREETKGRKMTQQSFGYGTGLIQRNTQRL

SEQ ID NO: 99677 - protein, 35 aa, Homo sapiens
MFHGIPATPGIGAPGNKPELYEEVKLYKNAREREK

SEQ ID NO: 99678 - protein, 625 aa, Homo sapiens
MCETSAFYVPGVAPINFHQNDPVEIKAVKLTSSRTQLPYEYYSLPFCQPSKITYKAENLGEVLRGDRIVNTPFQVLMNSEKKCEVLCSQSNKPVTLTVEQSRLVAERITEDYYVHLIADNLPVATRLELYSNRDSDDKKKEKDVQFEHGYRLGFTDVNKIYLHNHLSFILYYHREDMEEDQEHTYRVVRFEVIPQSIRLEDLKADEKSSCTLPEGTNSSPQEIDPTKENQLYFTYSVHWEESDIKWASRWDTYLTMSDVQIHWFSIINSVVVVFFLSGILSMIIIRTLRKDIANYNKEDDIEDTMEESGWKLVHGDVFRPPQYPMILSSLLGSGIQLFCMILIVIFVAMLGMLSPSSRGALMTTACFLFMFMGVFGGFSAGRLYRTLKGHRWKKGAFCTATLYPGVVFGICFVLNCFIWGKHSSGAVPFPTMVALLCMWFGISLPLVYLGYYFGFRKQPYDNPVRTNQIPRQIPEQRWYMNRFVGILMAGILPFGAMFIELFFIFSAIWENQFYYLFGFLFLVFIILVVSCSQISIVMVYFQLCAEDYRWWWRNFLVSGGSAFYVLVYAIFYFVNKLDIVEFIPSLLYFGYTALMVLSFWLLTGTIGFYAAYMFVRKIYAAVKID

SEQ ID NO: 99679 - protein, 50 aa, Homo sapiens
MAESAPARVKRHRRAGSRARWGWRSPLPGAGLRGLDAAGVLVSRGCRWRG

SEQ ID NO: 99680 - protein, 66 aa, Homo sapiens
GGVRQAYKVWCGSYRPEFAIQSIKTDVHSPLKYRVLGSLQNLAAFADTFHCARGTPMHPKERCRVW

SEQ ID NO: 99681 - protein, 354 aa, Homo sapiens
MQLQFRSWMLAALTLLVVFLIFADISEIEEEIGAEVVINGSSSPAVVDRSNESIKHNIQPASSKWRHNQTLSLRIRKQILKFLDAEKDISVLKGTLKPGDIIHYIFDRDSTMNVSQNLYELLPRTSPLKNKHFGTCAIVGNSGVLLNSGCGQEIDAHSFVIRCNLAPVQEYARDVGLKTDLVTMNPSVIQRAFEDLVNATWREKLLQRLHSLNGSILWIPAFMARGGKERVEWVNELILKHHVNVRTAYPSLRLLHAVRGYWLTNKVHIKRPTTGLLMYTLATRFCKQIYLYGFWPFPLDQNQNPVKYHYYDSLKYGYTSQASPHTMPLEFKALKSLHEQGALKLTVGQCDGAT

SEQ ID NO: 99682 - protein, 729 aa, Homo sapiens
MFPPSGSTGLIPPSHFQARPLSTLPRMAPTWLSDIPLVQPPGHQDVSERRLDTQRPQVTMWERDVSSDRQEPGRRGRSWGLEGSQALSQQAEVIVRQLQELRRLEEEVRLLRETSLQQKMRLEAQAMELEALARAEKAGRAEAEGLRAALAGAEVVRKNLEEGRQRELEEVQRLHQEQLSSLTQAHEEALSSLTSKAEGLEKSLSSLETRRAGEAKELAEAQREAELLRKQLSKTQEDLEAQVTLVENLRKYVGEQVPSEVHSQTWELERQKLLDTMQHLQEDRDSLHATAELLQVRVQSLTHILALQEEELTRKVQPSDSLEPEFTRKCQSLLNRWREKVFALMVQLKAQELEHSDSVKQLKGQVASLQEKVTSQSQEQAILQRSLQDKAAEVEVERMGAKGLQLELSRAQEARRRWQQQTASAEEQLRLVVNAVSSCPLPPPVTDVSLELQQLREERNRLDAELQLSARLIQQEVGRAREQGEAERQQLSKVAQQLEQELQQTQESLASLGLQLEVARQGQQESTEEAASLRQELTQQQELYGQALQEKVAEVETRLREQLSDTERRLNEARREHAKAVVSLRQIQRRAAQEKERSQELRRLQEEARKEEGQRLARRLQELERDKNLMLATLQQEGLLSRYKQQRLLTVLPSLLDKKKSVVSSPRPPECSASAPVAAAVPTRESIKGSLSVLLDDLQDLSEAISKEEAVCQGDNLDRCSSSNPQMSS

SEQ ID NO: 99683 - protein, 120 aa, Homo sapiens
MGWLCSGLLFPVSCLVLLQVASSGNMKVLQEPTCVSDYMSISTCEWKMNGPTNCSTELRLLYQLVFLLSEAHTCIPENNGGAGCVCHLLMDDVVSADNYTLDLWAGQQLLWKGSFKPSEH

SEQ ID NO: 99684 - protein, 506 aa, Homo sapiens
MHRGLIHPQSRAVGGDAMTPIVTVLICLRLSLGPRTHVQAGTLPKPTLWAEPGSVITQGSPVTLWCQGILETQEYRLYREKKTAPWITRIPQEIVKKGQFPIPSITWEHTGRYRCFYGSHTAGWSEPSDPLELVVTGAYIKPTLSALPSPVVTSGGNVTLHCVSQVAFGSFILCKEGEDEHPQCLNSQPRTHGWSRAIFSVGPVSPSRRWSYRCYAYDSNSPHVWSLPSDLLELLVLGVSKKPSLSVQPGPIVAPGESLTLQCVSDVSYDRFVLYKEGERDFLQLPGPQPQAGLSQANFTLGPVSRSYGGQYRCSGAYNLSSEWSAPSDPLDILIAGQFRGRPFISVHPGPTVASGENVTLLCQSWGPFHTFLLTKAGAADAPLRLRSIHEYPKYQAEFPMSPVTSAHSGTYRCYGSLSSNPYLLSHPSDSLELMVSGAAETLSPPQNKSDSKAGAANTLSPSQNKTASHPQDYTVENLIRMGIAGLVLVVLGILLFEAQHSQRSL

SEQ ID NO: 99685 - protein, 269 aa, Homo sapiens
MSWKKALRIPGGLRAATVTLMLAMLSTPVAEGRDSPEDFVYQFKAMCYFTNGTERVRYVTRYIYNREEYARFDSDVEVYRAVTPLGPPDAEYWNSQKEVLERTRAELDTVCRHNYQLELRTTLQRRVEPTVTISPSRTEALNHHNLLVCSVTDFYPAQIKVRWFRNDQEETTGVVSTPLIRNGDWTFQILVMLEMTPQHGDVYTCHVEHPSLQNPITVEWRAQSESAQSKMLSGIGGFVLGLIFLGLGLIIHHRSQKGPQGPPPAGLLH

SEQ ID NO: 99686 - protein, 548 aa, Homo sapiens
MAGGVWGRSRAREAPVGALTLTALTEGIRARQGQPQGPPSAGPQPKSWEVKPEAEPQTQALTAPSEAEPGRGATVPEAGSEPCSLNSALEPAPEGPHQVPQSSWEEGVLADLALYTAACLEEAGFAGTQATVLTLSSALEARGERLEDQVHALVRGLLAQVPSLAEGRPWRAALRVLSALALEHARDVVCALLPRSLPADRVAAELWRSLSRNQRVNGQVLVQLLWALKGASGPEPQALAATRALGEMLAVSGCVGATRGFYPHLLLALVTQLHKLARSPCSPDMPKIWVLSHRGPPHSHASSHCPPAHCPHHQLCCGGLEGAAHRGWRPHGGHVHGAGRRLEEAGGSPHPPGGRPAAGQCYGGTCRPPPARPLRRLAPSASQRGRPAASHGYGLLHRAVAEPAHRTAPAGGGHPGATPHLAGRPRTHCALVGPAGPGPPRAESQEGAAREHAAAGAPGRTGRRRRAARGCSAGRPEEAPAAAPGACAAPERGAGTAPPSATGRHTGLNPRLGRRAPWDSGAPGPGRAPAGAPRPPAEAGAAESRAAA

SEQ ID NO: 99687 - protein, 108 aa, Homo sapiens
MENLKSGVYPLKEASGCPGADRNLLVYSFYEKGPLTFRDVAIEFSLEEWQCLDTAQQDLYRKVMLENYRNLVFLGIAVSKPDLITCLEQGKEPWNMKRHAMVDQPPGR

SEQ ID NO: 99688 - protein, 273 aa, Homo sapiens
MAAGGDHGSPDSYRSPLASRYASPEMCFVFSDRYKFRTWRQLWLWLAEAEQTLGLPITDEQIQEMKSNLENIDFKMAAEEEKRLRHDVMAHVHTFGHCCPKAAGIIHLGATSCYVGDNTDLIILRNALDLLLPKLARVISRLADFAKERASLPTLGFTHFQPAQLTTVGKRCCLWIQDLCMDLQNLKRVRDDLRFRGVKGTTGTQASFLQLFEGDDHKVEQLDKMVTEKAGFKRAFIITGQTYTRKVDIEVLSVLASLGASVHKSFGNREESE

SEQ ID NO: 99689 - protein, 61 aa, Homo sapiens
MNNHQLELAKQLHKEGHLFYCTCSTLPGLLQSMDLSTLKCYPPGQPEKFSAFLDKVVGLQK

SEQ ID NO: 99690 - protein, 153 aa, Homo sapiens
MTDVLPQPDCSPKAGREPLALEESGSKRPPNTGARLWGRVRNKLLRNKLDPQTVETKNWHTDVIEMNGIKVEFSMKFTSRDMSLKRTPSKKQTGVFGVKISVVTKRERSKVPYIVRQCVEEAVRLLRKHHRLNGGGMHMPRWVSRVAGRQLSS

SEQ ID NO: 99691 - protein, 451 aa, Homo sapiens [sequence omitted]

SEQ ID NO: 99692 - protein, 89 aa, Homo sapiens
MEKSSSCESLGSQPAAARPPSVDSLSSASTSHSENSVHTKSASVVSSDSISTSADNFSPDLRVLRESNKLAEMEEPPLLPGENIKDMGP

SEQ ID NO: 99693 - protein, 438 aa, Homo sapiens
MRMSSKFPSPPLPIFLPPEPVDLGSITSSSCSLNELDNISHLLRKISADINEIKGMKAAILTVEANLFDLNVRVSKNEAKISSLEVKMNEYSTTYECNRQFEDQEEDTESQSRTTDVKIIGFLRNVEKGTQQRQLLSRLQIDPVMAETLQMSQDYYDMESMVHADTRSFILKKPKLSEEVVVAPNQESGMKTADSLRVLSGHLMQTRDLVQPDKPASPKFIVTLDGVPSPPGYMSDQEEDMCFEGMKPVNQTAASNKGLRGLLHPQQLHLLSRQLEDPNGSFSNAEMSELSVAQKPEKLLERCKYWPACKNGDECAYHHPISPCKAFPNCKFAEKCLFVHPNCKYDAKCTKPDCPFTHVSRRIPVLSPKPAVAPPAPPSSSQLCRYFPACKKMECPFYHPKHCRFNTQCTRPDCTFYHPTINVPPRHALKWIRPQTSE

SEQ ID NO: 99694 - protein, 81 aa, Homo sapiens
MKTGPFAEHSNQLWNISAVPSWSKVNQGLIRMYKAEEPAQVSLPPGSGACALWIPALPITALPIVALPLLQFYGVCVWLSN

SEQ ID NO: 99695 - protein, 103 aa, Homo sapiens
MLPLLQLGKSSLAAQAFVKGLIQGAIYAGIVIALLFLCLLPLIVKHIRKKQAKKAAAIRAKKSSKVRASQELEMSLKPEEPGKPVVATFSESRILEKQDKRAS

SEQ ID NO: 99696 - protein, 106 aa, Homo sapiens
MTKSNGEEPKMGGRMERFQQGVRKRTLLAKKKVQNITKEDVKSYLFRNAFVLLTVTAVIVGTILGFTLRPYRMSYREVKYFSFPGELLMRMLQMLVLPLIISSLVT

SEQ ID NO: 99697 - protein, 452 aa, Homo sapiens
MVQGGFPEKIRQRYADLPGELHIIELEKDKNGLGLSLAGNKDRSRMSIFVVGINPEGPAAADGRMRIGDELLEINNQILYGRSHQNASAIIKTAPSKVKLVFIRNEDAVNQMAVTPFPVPSSSPSSIEDQSGTEPISSEEDGSVEVGIKQLPESESFKLAVSQMKQQKYPTKVSFSSQEIPLAPASSYHSTDADFTGYGGFQAPLSVDPATCPIVPGQEMIIEISKGRSGLGLSIVGGKDTPLFWRLGSPRAWSQHLVRAFMLHHPVTEVEGQNAIVIHEVYEEGAAARDGRLWAGDQILEVNGVDLRNSSHEEAITALRQTPQKVRLVVYRDEAHYRDEENLEIFPVDLQKKAGRGLGLSIVGKRNGSGVFISDIVKGGAADLDGRLIQGDQILSVNGEDMRNASQETVATILKCAQGLVQLEIGRLRAGSWTSARTTSQNSQVVDGFSSD

SEQ ID NO: 99698 - protein, 65 aa, Homo sapiens
MLKVVSRMHRVSVILKLLVQQFSILETMTALDFNDFREYLSPASGFQSLQFRLLENKIGVLQNMR

SEQ ID NO: 99699 - protein, 119 aa, Homo sapiens
MWRSRWDASVLKAEALALLPCGLGMAFSQSHVMAARRHQHSRLIIEVDEYSSNPTQAFTFYNINQGRFQPPHVQMVDPVPHDAPKPPGYTRFVCVSDTHSRTDPIQMPYGDVLIHAGDF

SEQ ID NO: 99700 - protein, 447 aa, Homo sapiens
MTPQPAGPPDGGWGWVVAAAAFAINGLSYGLLRSLGLAFPDLAEHFDRSAQDTAWISALALAVQQAASPVGSALSTRWGARPVVMVGGVLASLGFVFSAFASDLLHLYLGLGLLAGFGWALVFAPALGTLSRYFSRRRVLAVGLALTGNGASSLLLAPALQLLLDTFGWRGALLLLGAITLHLTPCGALLLPLVLPGDPPAPPRSPLAALGLSLFTRRAFSIFALGTALVGGGYFVPYVHLAPHALDRGLGGYGAALVVAVAAMGDAGARLVCGWLADQGWVPLPRLLAVFGALTGLGLWVVGLVPVVGGEESWGGPLLAAAVAYGLSAGSYAPLVFGVLPGLVGVGGVVQATGLVMMLMSLGGLLGPPLSGFLRDETGDFTASFLLSGSLILSGSFIYIGLPRALPSCGPASPPATPPPETGELLPAPQAVLLSPGGPGSTLDTTC

SEQ ID NO: 99701 - protein, 301 aa, Homo sapiens
MIREKNPDGFLSAAEMPLFKLYMVMSACFLAAGIFWVSILCRNTYSVFKIHWLMAALAFTKSISLLFHSINYYFINSQGHPIEGLAVMYYIAHLLKGALLFITIALIGSGWAFIKYVLSDKEKKVFGIVIPMQVLANVAYIIIESREEGASDYVLWKEILFLVDLICCGAILFPVVWSIRHLQDASGTDGKVAVNLAKLKLFRHYYVMVICYVYFTRIIAILLQVAVPFQWQWLYQLLVEGSTLAFFVLTGYKFQPTGNNPYLQLPQEDEEDVQMEQVMTDSGFREGLSKVNKTASGRELL

SEQ ID NO: 99702 - protein, 135 aa, Homo sapiens
MVRHQPLQYYEPQLCLSCLTGIYGCRWKRYQRSHDDTTPWERLWFLLLTFTFGLTLTWLYFWWEVHNDYDEFNWYLYNRMGYWSDWPVPILVTTAAAFAYIAGLLVLALCHIAVGQQMNLHWLHKASSGLPLSPL

SEQ ID NO: 99703 - protein, 62 aa, Homo sapiens
MSRRKQTNPNKVHWDQVFAGLEEQARQAMMKTDFPGDLGSQRQAIQQLRDQDSSSSEFCTFW

SEQ ID NO: 99704 - protein, 479 aa, Homo sapiens
MATALVSAHSLAPLNLKKEGLRVVREDHYSTWEQGFKLQGNSKGLGQEPLCKQFRQLRYEETTGPREALSRLRELCQQWLQPETHTKEQILELLVLEQFLIILPKELQARVQEHHPESREDVVVVLEDLQLDLGETGQQVDPDQPKKQKILVEEMAPLKGVQEQQVRHECEVTKPEKEKGEETRIENGKLIVVTDSCGRVESSGKISEPMEAHNEGSNLERHQAKPKEKIEYKCSEREQRFIQHLDLIEHASTHTGKKLCESDVCQSSSLTGHKKVLSREKGHQCHECGKAFQRSSHLVRHQKIHLGEKPYQCNECGKVFSQNAGLLEHLRIHTGEKPYLCIHCGKNFRRSSHLNRHQRIHSQEEPCECKECGKTFSQALLLTHHQRIHSHSKSHQCNECGKAFSLTSDLIRHHRIHTGEKPFKCNICQKAFRLNSHLAQHVRIHNEEKPYQCSECGEAFRQRSGLFQHQRYHHKDKLA

SEQ ID NO: 99705 - protein, 137 aa, Homo sapiens
MLEAPGPSDGCELSNPSASRVSCAGQMLEVQPGLYFGGAAAVAEPDHLREAGITAVLTVDSEEPSFKAGPGVEDLWRLFVPALDKPETDLLSHLDRCVAFIGQARAEGRAVLVHWSLFQSCRSQSKCGHNNCFSHED

SEQ ID NO: 99706 - protein, 52 aa, Homo sapiens
MEPRAVAEAVETGEEDVIMEALRSYNQEWLLPELEANRPPASADADPTPLWI

SEQ ID NO: 99707 - protein, 228 aa, Homo sapiens
RQELESENKKLKNELNELRKALSEKSAPEVTAPGAPAYRVLMEQLTSVSEELDVRKEEVLILRSQLVSQKEAIQPKNTMTDSTILLEDVQKMKDKGEIAQAYIGLKETNRSSALDYHELNEDGELWLVYEGLKQANRLLESQLQSQKRSHENEAEALRGEIQSLKEENNRQQQLLAQNLQLPPEARIEASLQHEITRLTNENLYFEELYADDPKKYQSYRISLYKRMI

SEQ ID NO: 99708 - protein, 90 aa, Homo sapiens
MKSDCMQTTICQERKKDPIEMFHSGQLVKVCAPMVRYSKLAFRTLVRKYSCDLCYTPMIVAADFVKSIKARDSEFTTNQGGQWQKVMGLA

SEQ ID NO: 99709 - protein, 132 aa, Homo sapiens
MEPLTFRDVAIEFSPEEWKCLDPAQQNLYRDVMLENYRNLVSLAMCSHFTQDFLPVQGIEDSFHKLILRRYEKFSSLISSCRVISHGLSRGRNRATEKNDLLTTEEPVVKHRFDLQYPEEMWRNTVVQKGRK

SEQ ID NO: 99710 - protein, 64 aa, Homo sapiens
MCVSSSSSSHDEAPVLNDKHLDVPDIIITPPTPTGMMLPRDLGSTVWLDETGSCPDDGEIDPEA

SEQ ID NO: 99711 - protein, 464 aa, Homo sapiens
MSDTLTADVIGRRVEVNGEHATVRFAGVVPPVAGPWLGVEWDNPERGKHDGSHEGTVYFKCRHPTGGSFIRPNKVNFGTDFLTAIKNRYVLEDGPEEDRKEQIVTIGNKPVETIGFDSIMKQQSENKLKFPSGSVLTGTLSVLKVLVLNQTGITWAEVLRCVAGCPGLEELYLESNNIFISERPTDVLQTVKLLDLSSNQLIDENQLYLIAHLPRLEQLILSDTGISSLHFPDAGIGCKTSMFPSLKYLVVNDNQISQWSFFNELEKLPSLRALSCLRNPLTKEDKEAETARLLIIASIGQLKTLNKCEILPEERRRAELDYRKAFGNEWKQAGGHKDPEKNRLSEEFLTAHPRYQFLCLKYGAPEDWELKTQQPLMLKNQLLTLKIKYPHQLDQKVLEKQLPGSMTIQKVKGLLSRLLKVPVSDLLLSYESPKKPGREIELENDLKSLQFYSVENGDCLLVRW

SEQ ID NO: 99712 - protein, 293 aa, Homo sapiens
MAAPSGTVSDSESSNSSSDAEELERCREAAMPAWGLEQRPHVAGKPRAGAANSQLSTSQPSLRYYALWVQVSLIQQILIPCVCQMLGFTPGISRHKVNEHEQDGNELQTTPEFRAHVAKKLGALLDSFITISEAAKEPAKAKVQKVALEDDGFRLFFTSVPGGREKEESPQPRRKRQPSSSSEDSDEEWRRCREAAVSASDILQESAIHSPGTVEKEAKKKRKLKKKAKKVASVDSAVAATTPTSMATVQKQKSGELNGDQVSLGTKKKKKAKKASETSPFPPAKSATAIPAN

SEQ ID NO: 99713 - protein, 128 aa, Homo sapiens
MEIFSTYGKIKMIDMPVERMHPHLSKGYAYVEFENPDEAEKALKHMDGGQIDGQEITATAVLAPWPRPPPRRFSPPRRMLPPPPMWRRSPPRMRRRSRSPRRRSPVRRRSRSPGRRRHRSRSSSNSSR

SEQ ID NO: 99714 - protein, 41 aa, Homo sapiens
MAGFAELGLSSWLVEQCRQLGLKQPTPVQLGCIPAILEEAV

SEQ ID NO: 99715 - protein, 118 aa, Homo sapiens
MQCRLPRGLAGALLTLLCMGLLCLRYHLNLSPQRVQGTPELSQPNPGPPKLQLHDVFIAVKTTRAFHRLRLELLLDTWVSRTREQTFVFTDSPDKGLQERLGSPDSSSLLQGPTLWSP

SEQ ID NO: 99716 - protein, 127 aa, Homo sapiens
MAQALPWLLLWMGAGVLPAHGTQHGIRLPLRSGLGGAPLGLRLPRETDEEPEEPGRRGSFVEMVDNLRGKSGQGYYVEMTVGSPPQTLNILVDTGSSNFAVGAAPHPFLHRYYQRQLSSTYRDLRKA

SEQ ID NO: 99717 - protein, 113 aa, Homo sapiens
MKRMMKMRTPQYSTSNTGKTCFPAWWHPVESWSAATWGVKDWTWKPSCVGGVETKTNVMYKTPAPSCVSGICSDCHWQARFHVTTMELLLPPFGHPFKVPPTSTPHVRGFVPC

SEQ ID NO: 99718 - protein, 88 aa, Homo sapiens
MKKMEMEMEQVFEMKVKEKVQKLKDSEAELQRRHEQMKKNLEAQHKELEEKRRQFEDEKANWEAQQRILEQQNSSRTLEKNKKKGKIF

SEQ ID NO: 99719 - protein, 57 aa, Homo sapiens
MALLRDVSLQDPRDRFELLQRVGAGTYGDVYKARDTVTSELAAVKIVKLDPGNHHPA

SEQ ID NO: 99720 - protein, 172 aa, Homo sapiens
MATWALLLLAAMLLGNPGLEVSVSPKGKNTSGRESGFGWAIWMEGLVFSRLSPEYYDLARAHLRDEEKSCPCLAQEGPQGDLLTKTQELGRDYRTCLTIVQKLKKMVDKPTQRSVSNAATRVCRTGRSRWRDVCRNFMRRYQSRVTQGLVAGETAQQICEDLRLCIPSTGPL

SEQ ID NO: 99721 - protein, 482 aa, Homo sapiens
MTQTARVLVKFLEVIKPFCVILPEIQKPERKIQFKEKVLWTAITLFIFLVCCQIPLFGIMSSDSADPFYWMRVILASNRGTLMELGISPIVTSGLIMQLLAGAKIIEVGDTPKDRALFNGAQKLFGMIITIGQSIVYVMTGMYGDPSEMGAGICLLITIQLFVAGLIVLLLDELLQKGYGLGSGISLFIATNICETIVWKAFSPTTVNTGRGMEFEGAIIALFHLLATRTDKVRALREAFYRQNLPNLMNLIATIFVFAVVIYFQGFRVDLPIKSARYRGQYNTYPIKLFYTSNIPIILQSALVSNLYVISQMLSARFSGNLLVSLLGTWSDTSSGGPARAYPVGGLCYYLSPPESFGSVLEDPVHAVVYIVFMLGSCAFFSKTWIEVSGSSAKDVAKQLKEQQMVMRGHRETSMVHELNRYIPTAAAFGGLCIGALSVLADFLGAIGSGTGILLAVTIIYQYFEIFVKEQSEVGSMGALLF

SEQ ID NO: 99722 - protein, 149 aa, Homo sapiens
MEKDSDGCHLKHKMEHEQIETQGQVNHNGQKNNEFGLVENYKEALTQQLKNEDETDRPSLESANGKKKTKKLRMKRNHRVEPLNIDDCAPESPTPPPPPPPVGWGTPKVTRLPKLEPLGETHHNDFYRKPLPPLAVPQRPNSDAHDVIS

SEQ ID NO: 99723 - protein, 98 aa, Homo sapiens
MAQFDTEYQRLEASYSDSPPGEEDLLVHVAEGSKSPWHHIENLDLFFSRTFIICTRRMASHVCSSGRSLSSCSSSLWLPSLPSWSAAWTMTSYLPTRW

SEQ ID NO: 99724 - protein, 807 aa, Homo sapiens
MLRNSTFKNMQRRHTTLREKGRRQAIRGPAYMFNEKGTSLTPEEERFLDSAEYGNIPVVRKMLEESKTLNFNCVDYMGQNALQLAVGNEHLEVTELLLKKENLARVGDALLLAISKGYVRIVEAILNHPAFAQGQRLTLSPLEQELRDDDFYAYDEDGTRFSHDITPIILAAHCQEYEIVHILLLKGARIERPHDYFCKCNECTEKQRKDSFSHSRSRMNAYKGLASAAYLSLSSEDPVLTALELSNELARLANIETEFKNDYRKLSMQCKDFVVGVLDLCRDTEEVEAILNGDVNFQVWSDHHRPSLSRIKLAIKYEVKKLGRTLRSPFMKFVAHAVSFTIFLGLLVVNASDRFEGVKTLPNETFTDYPKQIFRVKTTQFSWTEMLIMKWVLGMIWSECKEIWEEGPREYVLHLWNLLDFGMLSIFVASFTARFMAFLKATEAQLYVDQHVQDDTLHNVSLPPEVAYFTYARDKWWPSDPQIISEGLYAIAVVLSFSRIAYILPANESFGPLQISLGRTVKDIFKFMVIFIMVFVAFMIGMFNLYSYYRGAKYNPAFTTVEESFKTLFWSIFGLSEVISVVLKYDHKFIENIGYVLYGVYNVTMVVVLLNMLIAMINNSYQEIEEDADVEWKFARAKLWLSYFDEGRTLPAPFNLVPSPKSFYYLIMRIKMCLIKLCKSKAKSCENDLEMGMLNSKFKKTRYQAGMRNSENLTANNTLSKPTRYQKIMKRLIKRYVLKAQVDRENDEVNEGELKEIKQDISSLRYELLEEKSQATGELADLIQQLSEKFGKNLNKDHLRVNKGKDI

SEQ ID NO: 99725 - protein, 55 aa, Homo sapiens
MSALLRLLRTGAPAAACLRLGTSAGTGSRRAMALYHTEERGQPCSQNYRLFFKSV

SEQ ID NO: 99726 - protein, 285 aa, Homo sapiens
MVGEGPYLISDLDQRGRRRSFAERYDPSLKTMIPVRPCARLAPNPVDDAGLLSFATFSWLTPVMVKGYRQRLTVDTLPPLSTYDSSDTNAKRFRVLWDEEVARVGPEKASLSHVVWKFQRTRVLMDIVANILCIIMAAIGPTVLIHQILQQTERTSGKVWVGIGLCIALFATEFTKVFFWALAWAINYRTAIRLKVALSTLVFENLVSFKTLTHISVGEVLNILSSDSYSLFEAALFCPLPATIPILMVFCAAYAFFILGPTALIGISVCLWPSSIQLSEGQQFW

SEQ ID NO: 99727 - protein, 41 aa, Homo sapiens
MASVRIREAKEGDCGDILRLIRVKTAGASRIRKTLGSGEDQ

SEQ ID NO: 99728 - protein, 103 aa, Homo sapiens
MTKLEYEEIALDLTPVIEELTNAGFLQTESELQELSEVLELLSAPELKSLAKTFHLVNPNGQKQQLVDAFLKLAKQRSVCTWGKNKPGIGAVILKRFCWLLLQ

SEQ ID NO: 99729 - protein, 442 aa, Homo sapiens
MSNDGRSRNRDRRYDEVPSDLPYQDTTIRTHPTLHDSERAVSADPLPPPPLPLQPPFGPDFYSSDTEEPAIAPDLKPVRRFVPDSWKNFFRGKKKDPEWDKPVSDIRYISDGVECSPPASPARPNHRSPLNSCKDPYGGSEGTFSSRKEADAVFPRDPYGSLDRHTQTVRTYSEKVEEYNLRYSYMKSWAGLLRILGVVELLLGAGVFACVTAYIHKDSEWYNLFGYSQPYGMGGVGGLGSIALVCLKLWRHEAARRHREYMEQQEINEPSLSSKRKMCEMATSGDRQRDSEVNFKELRTAKMKPELLSGHIPPGHIPKPIVMPDYVAKYPVIQTDDERERYKAVFQDQFSEYKELSAEVQAVLRKFDELDAVMSRLPHHSESRQEHERISRIHEEFKKKKNDPTFLEKKERCDYLKNKLSHIKQRIQEYDKVMNWDVQGYS

SEQ ID NO: 99730 - protein, 681 aa, Homo sapiens
MDRRNDYGYRVPLFQGPLPPPGSLGLPFPPDIQTETTEEDSVLLMHTLLAATKDSLAMDPPVVNRPKKSKTKKAPIKTITKAAPAAPPVPAANEIATNKPKITWQALNLPVITQISQALPTTEVTNTQASSVTAQPKKANKMKRVTAKAAQGSQSPTGHEGGTIQLKSPLQVLKLPVISQNIHAPIANESASSQALITSIKPKKASKAKKAANKAIASATEVSLAATATHTATTQGQITNETASIHTTAASIRTKKASKARKTIAKVINTDTEHIEALNVTDAATRQIEASVVAIRPKKSKGKKAASRGPNSVSEISEAPLATQIVTNQALAATLRVKRGSRARKAATKARATESQTPNADQGAQAKIASAQTNVSALETQVAAAVQALADDYLAQLSLEPTTRTRGKRNRKSKHLNGDERSGSNYRRIPWGRRPAPPRDVAILQERANKLVKYLLVKDQTKIPIKRSDMLRDVIQEYDEYFPEIIERASYTLEKMFRVNLKEIDKQSSLYILISTQESSAGILGTTKDTPKLGLLMVILSVIFMNGNKASEAVIWEVLRKLGLRPGVRHSLFGEVRKLITDEFVKQKYLEYKRVPNSRPPEYEFFWGLRSYHETSKMKVLKFACRVQKKDPKDWAVQYREAVEMEVQAAAVAVAEAEARAEWFQHQHWLYWRTQHQHGLQ

SEQ ID NO: 99731 - protein, 2005 aa, Homo sapiens
MQPPSLLLLLLLLLLLLLCVSVVRPRGLLCGSFPEPCANGGTCLSLSLGQGTCQCAPGFLGETCQFPDPCQNAQLCQNGGSCQALLPAPLGLPSSPSPLTPSFLCTCLPGFTGERCQAQLEDPCPPSFCSKRGRCHIQASGRPQCSCMPGWTGEQCQLRDFCSANPCVNGGVCLATYPQIQCHCPPGFEGHACERDVNECFQDPGPCPKGTSCHNTLGSFQCLCPVGQEGPRCELRAGPCPPRGCSNGGTCQLMPEKDSTFHLCLCPPGFIGPDCEVNPDNCVSHQCQNGGTCQDGLDTYTCLCPETWTGWDCSEDVDECEAQGPPHCRNGGTCQNSAGSFHCVCVSGWGGTSCEENLDDCIAATCAPGSTCIDRVGSFSCLCPPGRTGLLCHLEDMCLSQPCHGDAQCSTNPLTGSTLCLCQPGYSGPTCHQDLDECLMAQQGPSPCEHGGSCLNTPGSFNCLCPPGYTGSRCEADHNECLSQPCHPGSTCLDLLATFHCLCPPGLEGQLCEVETNECASAPCLNHADCHDLLNGFQCICLPGFSGTRCEEDIDECRSSPCANGGQCQDQPGAFHCKCLPGFEGPRCQTEVDECLSDPCPVGASCLDLPGAFFCLCPSGFTGQLCEVPLCAPNLCQPKQICKDQKDKANCLCPDGSPGCAPPEDNCTCHHGHCQRSSCVCDVGWTGPECEAELGGCISAPCAHGGTCYPQPSGYNCTCPTGYTGPTCSEEMTACHSGPCLNGGSCNPSPGGYYCTCPPSHTGPQCQTSTDYCVSAPCFNGGTCVNRPGTFSCLCAMGFQGPRCEGKLRPSCADSPCRNRATCQDSPQGPRCLCPTGYTGGSCQTLMDLCAQKPCPRNSHCLQTGPSFHCLCLQGWTGPLCNLPLSSCQKAALSQGIDVSSLCHNGGLCVDSGPSYFCHCPPGFQGSLCQDHVNPCESRPCQNGATCMAQPSGYLCQCAPGYDGQNCSKELDACQSQPCHNHGTCTPKPGGFHCACPPGFVGLRCEGDVDECLDQPCHPTGTAACHSLANAFYCQCLPGHTGQWCEVEIDPCHSQPCFHGGTCEATAGSPLGFICHCPKGFEGPTCSHRAPSCGFHHCHHGGLCLPSPKPGFPPRCACLSGYGGPDCLTPPAPKGCGPPSPCLYNGSCSETTGLGGPGFRCSCPHSSPGPRCQKPGAKGCEGRSGDGACDAGCSGPGGNWDGGDCSLGVPDPWKGCPSHSRCWLLFRDGQCHPQCDSEECLFDGYDCETPPACTPAYDQYCHDHFHNGHCEKGCNTAECGWDGGDCRPEDGDPEWGPSLALLVVLSPPALDQQLFALARVLSLTLRVGLWVRKDRDGRDMVYPYPGARAEEKLGGTRDPTYQERAAPQTQPLGKETDSLSAGFVVVMGVDLSRCGPDHPASRCPWDPGLLLRFLAAMAAVGALEPLLPGPLLAVHPHAGTAPPANQLPWPVLCSPVAGVILLALGALLVLQLIRRRRREHGALWLPPGFTRRPRTQSAPHRRRPPLGEDSIGLKALKPKAEVDEDGVVMCSGPEEGEEVGQAEETGPPSTCQLWSLSGGCGALPQAAMLTPPQESEMEAPDLDTRGPDGVTPLMSAVCCGEVQSGTFQGAWLGCPEPWEPLLDGGACPQAHTVGTGETPLHLAARFSRPTAARRLLEAGANPNQPDRAGRTPLHAAVAADAREVCQLLLRSRQTAVDARTEDGTTPLMLAARLAVEDLVEELIAAQADVGARDKWGKTALHWAAAVNNARAARSLLQAGADKDAQDNREQTPLFLAAREGAVEVAQLLLGLGAARELRDQAGLAPADVAHQRNHWDLLTLLEGAGPPEARHKATPGREAGPFPRARTVSVSVPPHGGGALPRCRTLSAGAGPRGGGACLQARTWSVDLAARGGGAYSHCRSLSGVGAGGGPTPRGRRFSAGMRGPRPNPAIMRGRYGVAAGRGGRVSTDDWPCDWVALGACGSASNIPIPPPCLTPSPERGSPQLDCGPPALQEMPINQGGEGKK

SEQ ID NO: 99732 - protein, 348 aa, Homo sapiens
MAGLKRRASQVWPEEHGEQEHGLYSLHRMFDIVGTHLTHRDVRVLSFLFVDVIDDHERGLIRNGRDFLLALERQGRCDESNFRQVLQLLRIITRHDLLPYVTLKRRRAVCPDLVDKYLEETSIRYVTPRALSDPEPRPPQPSKTVPPHYPVVCCPTSGPQMCSKRPARGRATLGSQRKRRKSVTPDPKEKQTCGEEVQGFQRWSRLEGEYKELLGHWAVYAIQYIRLRVRAEYCQHETALQGNVFSNKQDPLERQFERFNQANTILKSRDLGSIICDIKFSELTYLDAFWRDYINGSLLEALKGVFITDSLKQAVGHEAIKLLVNVDEEDYELGRQKLLRNLMLQALP

SEQ ID NO: 99733 - protein, 781 aa, Homo sapiens
MDSSIHLSSLISRHDDEATRTSTSEGLEEGEVEGETLLIVESEDQASVDLSHDQSGDSLNSDEGDVSWMEEQLSYFCDKCQKWIPASQLREQLSYLKGDNFFRFTCSDCSADGKEQYERLKLTWQQVVMLAMYNLSLEGSGRQGYFRWKEDICAFIEKHWTFLLGNRKKTSTWWSTVAGCLSVGSPMYFRSGAQEFGEPGWWKLVHNKPPTMKPEGEKLSASTLKIKASKPTLDPIITVEGLRKRASRNPVESAMELKEKRSRTQEAKDIRRAQKEAAGFLDRSTSSTPVKFISRGRRPDVILEKGEVIDFSSLSSSDRTPLTSPSPSPSLDFSAPGTPASHSATPSLLSEADLIPDVMPPQALFHDDDEMEGDGVIDPGMEYVPPPAGSVASGPVVGVRKKVRGPEQIKQEVESEEEKPDRMDIDSEDTDSNTSLQTRAREKRKPQLEKDTKPKEPRYTPVSIYEEKLLLKRLEACPGAVAMTPEARRLKRKLIVRQAKRDRGLPLFDLDQVVNAALLLVDGIYGAKEGGISRLPAGQATYRTTCQDFRILDRYQTSLPSRKGFRHQTTKFLYRLVGSEDMAVDQSIVSPYTSRILKPYIRRDYETKPPKLQLLSQIRSHLHRSDPHWTPEPDAPLDYCYVRPNHIPTINSMCQEFFWPGIDLSECLQYPDFSVVVLYKKVIIAFGFMVPDVKYNEAYISFLFVHPEWRRAGIATFMIYHLIQTCMGKDVTLHVSASNPAMLLYQKFGFKTEEYVLDFYDKYYPLESTECKHAFFLRLRR

SEQ ID NO: 99734 - protein, 317 aa, Homo sapiens
MAEAVFHAPKRKRRVYETYESPLPIPFGQDHGPLKEFKIFRAEMINNNVIVRNAEDIEQLYGKGYFGKGILSRSRPSFTISDPKLVAKWKDMKTNMPIITSKRYQHSVEWAAELMRRQGQDESTVRRILKDYTKPLEHPPVKRNEEAQVHDKLNSGMVSNMEGTAGGERPSVVNGDSGKSGGVGDPREPLGCLQEGSGCHPTTESFEKSVREDASPLPHVCCCKQDALILQRGLHHEDGSQHIGLLHPGDRGPDHEYVLVEEAECAMSEREAAPNEELVQRNRLICRRNPYRIFEYLQLSLEELGPLLGLPSSPGAL

SEQ ID NO: 99735 - protein, 783 aa, Homo sapiens
MRSAAKPWNPAIRAGGHGPDRVRPLPAASSGMKSSKSSTSLAFESRLSRLKRASSEDTLNKPGSTAASGVVRLKKTATAGAISELTESRLRSGTGAFTTTKRTGIPAPREFSVTVSRERSVPRGPSNPRKSVSSPTSSNTPTPTKHLRTPSTKPKQENEGGEKAALESQVRELLAEAKAKDSEINRLRSELKKYKEKRTLNAEGTDALGPNVDGTSVSPGDTEPMIRALEEKNKNFQKELSDLEEENRVLKEKLIYLEHSPNSEGAASHTGDSSCPTSITQESSFGSPTGNQMSSDIDEYKKNIHGNALRTSGSSSSDVTKASLSPDASDFEHITAETPSRPLSSTSNPFKSSKCSTAGSSPNSVSELSLASLTEKIQKMEENHHSTAEELQATLQELSDQQQMVQELTAENEKLVDEKTILETSFHQHRERAEQLSQENEKLMNLLQERVKNEEPTTQEGKIIELEQKCTGILEQGRFEREKLLNIQQQLTCSLRKVEEENQGALEMIKRLKEENEKLNEFLELERHNNNMMAKTLEECRVTLEGLKMENGSLKSHLQGEKQKATEASAVEQTAESCEVQEMLKVARAEKDLLELSCNELRQELLKANGEIKHVSSLLAKVEKDYSYLKEICDHQAEQLSRTSLKLQEKASESDAEIKDMKETIFELEDQVEQHRAVKLHNNQLISELESSVIKLEEQKSDLERQLKTLTKQMKEETEEWRRFQADLQTAVVVANDIKCEAQQELRTVKRKLLEEEEKNARLQKELGDVQGHGRVVTSRAAP

SEQ ID NO: 99736 - protein, 43 aa, Homo sapiens
MADPDPRYPRSSIEDDFNYGSSVASATVHIRMGPRMQQVFEDY

SEQ ID NO: 99737 - protein, 889 aa, Homo sapiens
MVLAQGLLSMALLALCWERSLAGAEETIPLQTLRCYNDYTSHITCRWADTQDAQRLVNVTLIRRVNEDLLEPVSCDLSDDMPWSACPHPRCVPRRCVIPCQSFVVTDVDYFSFQPDRPLGTRLTVTLTQHVQPPEPRDLQISTDQDHFLLTWSVALGSPQSHWLSPGDLEFEVVYKRLQDSWEDAAILLSNTSQATLGPEHLMPSSTYVARVRTRLAPGSRLSGRPSKWSPEVCWDSQPGDEAQPQNLECFFDGAAVLSCSWEVRKEVASSVSFGLFYKPSPDAGEEECSPVLREGLGSLHTRHHCQIPVPDPATHGQYIVSVQPRRAEKHIKSSVNIQMAPPSLNVTKDGDSYSLRWETMKMRYEHIDHTFEIQYRKDTATWKDSKTETLQNAHSMALPALEPSTRYWARVRVRTSRTGYNGIWSEWSEARSWDTESVLPMWVLALIVIFLTIAVLLALRFCGIYGYRLRRKWEEKIPNPSKSHLFQNGSAELWPPGSMSAFTSGSPPHQGPWGSRFPELEGVFPVGFGDSEVSPLTIEDPKHVCDPPSGPDTTPAASDLPTEQPPSPQPGPPAASHTPEKQASSFDFNGPYLGPPHSRSLPDILGQPEPPQEGGSQKSPPPGSLEYLCLPAGGQVQLVPLAQAMGPGQAVEVERRPSQGAAGSPSLESGGGPAPPALGPRVGGQDQKDSPVAIPMSSGDTEDPGVASGYVSSADLVFTPNSGASSVSLVPSLGLPSDQTPSLCPGLASGPPGAPGPVKSGFEGYVELPPIEGRSPRSPRNNPVPPEAKSPVLNPGERPADVSPTSPQPEGLLVLQQVGDYCFLPGLGPGPLSLRSKPSSPGPGPEIKNLDQAFQVKKPPGQAVPQVPVIQLFKALVVSVMSVGPPVP

SEQ ID NO: 99738 - protein, 666 aa, Homo sapiens
MNPQQQRMAAIGTDKELSDLLDFSAMFSPPVNSGKTRPTTLGSSQFSGSGTIHEMKQLNSKARQKGQRIKGFTDSPHYSDHLNDSRLGAHEGLSPTPFMNSNLMGKTSERGSFSLYSRDTGLPGCQSSLLRQDLGLGSPAQLSSSGKPGTAYYSFSATSSRRRPLHDSAALDPLQAKKVRKVPPGLPSSVYAPSPNSDDFNRESPSYPSPKPPTSMFASTFFMQDGTHNSSDLWSSSNGMSQPGFGGILGTSTSHMSQSSSYGNLHSHDRLSYPPHSVSPTDINTSLPPMSSFHRGSTSSSPYVAASHTPPINGSDSILGTRGNAAGSSQTGDALGKALASIYSPDHTSSSFPSNPSTPVGSPSPLTGTSQWPRPGGQAPSSPSYENSLHSLKNRVEQQLHEHLQDAMSFLKDVCEQSRMEDRLDRLDDAIHVLRNHAVGPSTSLPAGHSDIHSLLGPSHNAPIGSLNSNYGGSSLVASSRSASMVGTHREDSVSLNGNHSVLSSTVTTSSTDLNHKTQENYRGGLQSQSGTVVTTEIKTENKEKDENLHEPPSSDDMKSDDESSQKDIKVSSRGRTSSTNEDEDLNPEQKIEREKERRMANNARERLRVRDINEAFKELGRMCQLHLKSEKPQTKLLILHQAVAVILSLEQQVRERNLNPKAACL

SEQ ID NO: 99739 - protein, 548 aa, Homo sapiens
MEQPGTAASPVSGSMFSWVSKDARRKKEPELFQTVAEGLRQLYAQKLLPLEEHYRFHEFHSPALEDADFDNKPMVLLVGQYSTGKTTFIRHLIEQDFPGMRIGPEPTTDSFIAVMHGPTEGVVPGNALVVDPRRPFRKLNAFGNAFLNRFMCAQLPNPVLDSISIIDTPGILSGEKQRISRGYDFAAVLEWFAERVDRIILLFDAHKLDISDEFSEVIKALKNHEDKIRVVLNKADQIETQQLMRVYGALMWSLGKIINTPEVVRVYIGSFWSHPLLIPDNRKLFEAEEQDLFKDIQSLPRNAALRKLNDLIKRARLAKVHAYIISSLKKEMPNVFGKESKKKELVNNLGEIYQKIEREHQISPGDFPSLRKMQELLQTQDFSKFQALKPKLLDTVDDMLANDIARLMVMVRQEESLMPSQVVKGGAFDGTMNGPFGHGYGEGAGEGIDDVEWVVGKDKPTYDEIFYTLSPVNGKITGANAKKEMVKSKLPNTVLGKIWKLADVDKDGLLDDEEFALANHLIKVKLEGHELPADLPPHLVPPSKRRHE

SEQ ID NO: 99740 - protein, 62 aa, Homo sapiens
MALHSPQYIFGDFSPDEFNQFFVTPRSSVEDKNIRELSLVSMKSLNPVTLCREPPATVFQAH

SEQ ID NO: 99741 - protein, 117 aa, Homo sapiens
MSIQLLQTTRIGVAVNGVRKHCSDKEVVSLAKVLIKNWKRLLDSPGPPKGEKGEEREKAKKKEKGLECSDWKPEAGLSPPRKKREDPKTRRDSVDSKSSASSSPKRPSVERACSLMQ

SEQ ID NO: 99742 - protein, 554 aa, Homo sapiens
MSTRTPLPTVNERDTENHTSHGDGRQEVTSRTSRSGARCRNSIASCADEQPHIGNYRLLKTIGKGNFAKVKLARHILTGREVAIKIIDKTQLNPTSLQKLFREVRIMKILNHPNIVKLFEVIETEKTLYLIMEYASGGEVFDYLVAHGRMKEKEARSKFRQIVSAVQYCHQKRIVHRDLKAENLLLDADMNIKIADFGFSNEFTVGGKLDTFCGSPPYAAPELFQGKKYDGPEVDVWSLGVILYTLVSGSLPFDGQNLKELRERVLRGKYRIPFYMSTDCENLLKRFLVLNPIKRGTLEQIMKDRWINAGHEEDELKPFVEPELDISDQKRIDIMVGMGYSQEEIQESLSKMKYDEITATYLLLGRKSSELDASDSSSSSNLSLAKVRPSSDLNNSTGQSPHHKVQRSVSSSQKQRRYSDHAGPAIPSVVAYPKRSQTSTADSDLKEDGISSRKSSGSAVGGKGIAPASPMLGNASNPNKADIPERKKSSTVPSSNTASGGMTRRNTYVCSERTTADRHSVIQNGKENRSLEDPFFFCKASVHTLLPCLYALKI

SEQ ID NO: 99743 - protein, 574 aa, Homo sapiens
MPRAPRCRAVRSLLRSHYREVLPLATFVRRLGPQGWRLVQRGDPAAFRALVAQCLVCVPWDARPPPAAPSFRQVSCLKELVARVLQRLCERGAKNVLAFGFALLDGARGGPPEAFTTSVRSYLPNTVTDALRGSGAWGLLLRRVGDDVLVHLLARCALFVLVAPSCAYQVCGPPLYQLGAATQARPPPHASGPRRRLGCERAWNHSVREAGVPLGLPAPGARRRGGSASRSLPLPKRPRRGAAPEPERTPVGQGSWAHPGRTRGPSDRGFCVVSPARPAEEATSLEGALSGTRHSHPSVGRQHHAGPPSTSRPPRPWDTPCPPVYAETKHFLYSSGDKEQLRPSFLLSSLRPSLTGARRLVETIFLGSRPWMPGTPRRLPRLPQRYWQMRPLFLELLGNHAQCPYGVLLKTHCPLRAAVTPAAGVCAREKPQGSVAAPEEEDTDPRRLVQLLRQHSSPWQVYGFVRACLRRLVPPGLWGSRHNERRFLRNTKKFISLGKHAKLSLQELTWKMSVRDCAWLRRSPGEEVVAVEGPGPRAECSRGSEKGAGRALVLLSPSSRGHTWLFAQDVEWTR

SEQ ID NO: 99744 - protein, 65 aa, Homo sapiens
MEASALTSSAVTSVAKVVRVASGSAVVLPLARIATVVIGGVVAMAAVPMVLSAMGFTAAGIASSS

SEQ ID NO: 99745 - protein, 6436 aa, Homo sapiens
MKGARWRRVPWVSLSCLCLCLLPHVVPGTTEDTLITGSKTPAPVTSTGSTTATLEGQSTAASSRTSNQDISASSQNHQTKSTETTSKAQTDTLTQMMTSTLFSSPSVHNVMETVTQETAPPDEMTTSFPSSVTNTLMMTSKTITMTTSTDSTLGNTEETSTAGTESSTPVTSAVSITAGQEGQSRTTSWRTSIQDTSASSQNHWTRSTQTTRESQTSTLTHRTTSTPSFSPSVHNVTGTVSQKTSPSGETATSSLCSVTNTSMMTSEKITVTTSTGSTLGNPGETSSVPVTGSLMPVTSAALVTVDPEGQSPVTFSRTSTQDTTAFSKNHQTQSVETTRVSQINTLNTLTPVTTSTVLSSPSGFNPSGTVSQETFPSGETTISSPSSVSNTFLVTSKVFRMPISRDSTLGNTEETSLSVSGTISAITSKVSTIWWSDTLSTALSPSSLPPKISTAFHTQQSEGAETTGRPHERSSFSPGVSQEIFTLHETTTWPSSFSSKGHTTWSQTELPSTSTGAATRLVTGNPSTGAAGTIPRVPSKVSAIGEPGEPTTYSSHSTTLPKTTGAGAQTQWTQETGTTGEALLSSPSYSVTQMIKTATSPSSSPMLDRHTSQQITTAPSTNHSTIHSTSTSPQESPAVSQRGHTQAPQTTQESQTTRSVSPMTDTKTVTTPGSSFTASGHSPSEIVPQDAPTISAATTFAPAPTGDGHTTQAPTTALQAAPSSHDATLGPSGGTSLSKTGALTLANSVVSTPGGPEGQWTSASASTSPDTAAAMTHTHQAESTEASGQTQTSEPASSGSRTTSAGTATPSSSGASGTTPSGSEGISTSGETTRFSSNPSRDSHTTQSTTELLSASASHGAIPVSTGMASSIVPGTFHPTLSEASTAGRPTGQSSPTSPSASPQETAAISRMAQTQRTRTSRGSDTISLASQATDTFSTVPPTPPSITSSGLTSPQTQTHTLSPSGSGKTFTTALISNATPLPVTYASSASTGHTTPLHVTDASSVSTGHATPLPVTDTSSESTGHATPLPVTSPSSVSTGHTTPLPVTDTSSESTGHVTPLPVTSLSSASTGDSTPLPVTDTSSASTGHVTPLPVTSLSSASTGDTTPLPVTDTSSASTGHATSLPVTDTSSVSTGHTTPLPVTDTSSASTGHATSLPVTDTSSVSTAHATPLPVTGLSSASTDDTTRLPVTDVSSASTGQAIPLPVTSPSSASTGDTTPLPVTDASSASTGDTTSLPVTIPSSASSGHTTSLPVTDASSVSTGHATSLLVTDASSVSTGDTTPLPVTDTNSASTGDTTPLHVTDASSVSTGHATSLPVTSLSSASTGDTTPLPVTSPSSASSGHTTPLPVTDASSVPTGHATSLPVTDASSVSTGHATPLPVTDASSVSTGHATPLPVTDTSSVSTGQATPLPVTSLSSASTGDTTPLPVTDTSSASTGQDTPLPVTSLSSVSTGDTTPLPVTSPSSASTGHATPLLVTDASSVSTGHATSLLVTDASSVSTGHATALHVTDASSLSTGDTTPLPVTSPSSASTGDTTPLPVTDTSSASTGHATSLPVTDTSSASTGHATPLPVTDTSSASTGQATPLPVTGPSSASTGHAIPLLVTDTSSASTGQATPLPVTSLSSASTGDTTPLPVTDASSVSTGHATSLPVTSLSSVSTGDTTPLPVTSPSSASSGHTTPLPVTDASSVSTGDTTPLPVTSPSSASSGHTTPLPVTSPSSASSGHTTPLPVTDASSASTGDTTPLPVTDTSSASTGHATHLPVTGLSSASTGDTTRLPVTNVSSASTGHATPLPVTSTSSASTGDTTPLPGTDTSSVSTGHTTPLLVTDASSVSTGDTTRLPVTSPSSASTGHTTPLPVTDTPSASTGDTTPLPVTNASSLSTRHTTSLHVTSPSSASTGHATSLPVTDTSSVSTGHATPLHVTSPSSASTGDTTPLPVTDTYSASTGQATPLPVTDTSSASTGDTTPLPVTDTSSASTGHATPLPVTNTSSVSTGHATPLHVTSPSSASTGHTTPLPVTDASSVSTGHATSLPVTDASSVFTGHATSLPVTIPSSASSGHTTPLPVTDASSVSTGHATSLPVTDASSVSTGHATPLPVTDASSVSTGHATPLPVTDTSSVSTGHATPLPLTSLSSVSTGDTTPLPVTDTSSASTGQATPLPVTSLSSVSTGDTTPLPVTDTSSASTGHATSLPVTDTSSASTGHATPLPDTDTSSASTGHATPLPVTDTSSASTGHATLLPVTDTSSASIGHATPLPVTDTSSISTGHATPLHVTSPSSASTGHATPLPVTDTSSASTGHANPLHVTSPSSASTGHATPLPVTDTSSASTGHATPLPVTSLSSVSTGDTTPLPVTSPSSASTGHTTPLPVTDTSSASTGQATALPVTSTSSASTGDTTPLPVTDTSSASTGQATPLPVTSLSSVSTGDTTPLPVTSPSSASTGHATPLLVTDASSASTGQATPLPVTDTSSAYTGDTTSLPVTDTSSSSTGDTTPLLVTETSSASTGHATPLHVTSPSSASTGDTTPVPVTDTSSVSTGHATPLPVTGLSSASTGDTTRLPVTDISSASTGQATPLPVTNTSSASTGHATPLPVTGLSSASTGDTTRLPVTDISSASTGQATPLPVTNTSSVSTGDTMPLPVTSPSSASTGHATPLPVTSTSSASTGHATPVPVTSTSSASTGHTTPLPVTDTSSASTGDTTPLPVTSPSSASTGHTTPLHVTIPSSASTGDTSTLPVTGASSASTGHATPLPVTDTSSVSTGHATPLPVTSFSSVSTGDTTPLPVTDTSSVSTGHATPLPVTSFSSVSTGDTTPLPVTDASSASTGHATPLPVTDTSSVSTGHATPLPLTSLSSVSTGDTTTLPVTDTSSVSTGHATPLPVTSFSSVSTGDTTPLPVTDASSASTGHATPLPVTDTSSVSTGHATPLPVTSLSSVSTGDTTPLPVTDASSASTGQATPLPVTSLSSVSTGDTTPLPVTIPSSASSGHTTSLPVTDTSSASTGQATPLPVTSLSSVSTGDTTPLLVTDASSVSTGHATPLPVTDTSSASTGDTTRLPVTDTSSASTGQATPLPVTSLSSVSTGDTTPLLVTNTSSVSRGHATSLPVTIPSSSSSGHTTPLPVTSTSSVSTGHVTPLPVTSTSSASTGHATSLPVTDTSSVSTGHATSLPVTDTSSVSTGHATPLPVTDASSVSTGHATPLPVTDASSASTGDTTPLPVTNTSSASTGQATPLPVTSLSSVSTGDTMPLPVTSPSSASTGHATPLPVTGLSSASTGDTTPLPVTDTSSASTGHVTPLPVTSLSSASTGDSTPLPVTDTSSASTGHVTPLPVTSLSSASTGDTTPLPVTDTSSASTGHATPLHVTDASSASTGQATLLPVTSLSSVSTGDTTPLPVTSPSSASTGHATPLLVTDTSSASTGHATPLPVTDASSVSTGHATSLPVTIRSSGSTGHTTPLPVTDTSSASTGQATSLLVTDTSSVSTGDTTPLPVTSTSSASTGHVTPLHVTSPSSASTGHATPLPVTSLSSASTGDTMPLPVTSPSSASTGDTTPLPVTDASSVSTGHTTPLPVTSPSSASTGHTTPLPVTDTTSASKGDTTPLPVTSPSSASTGHTTPLPVTDTSSASTGDTTPLPVTSPSSASTGHATPLPVTNASSLSTGHATPLHVTSPSSASTGHATPLPVTSTSSASTGHATSLPVTSTSSASTGHATPLPVTDNSSVSTGHATPLPVTGLSSATTDDTTRLPVTDVSSASTGQATPLPVTSLSSVSTGDTTPLPVTSPSSASTGHASPLLVTDASSASTGQATPLPVTDTSSVSTAHATPLPVTGLSSASTDDTTRLPVTDVSSASTGQAIPLPVTSPSSASTGDTTPLPVTDASSASTGDTTSLPVTIPSSASSGHTTSLPVTDASSVSTGHATSLLVTDASSVSTGDTTPLPVTDTNSASTGDTTPLHVTDASSVSTGHATSLPVTSLSSASTGDTTPLPVTSPSSASSGDTTPLPVTDTSSASTGHATHLPVTGLSSASTGDTTRLPVTNVSSASTGHATPLPVTSTSSASTGDTTPLPGTDTSSVSTGHTTPLLVTDASSVSTGDTTRLPVTSPSSASTGHTTPLHVTDASSVSTGHTTPLPVTDTSSASTGQATSLLVTDTSSVSTGDTTPLPVTSTSSASTGHVTPLHVTSPSSASTGHATPLPVTSLSSASTGDTTPLPVTDTSSVSTGHTTPLPVTSPSSASTGHTTPLPVTDTSSASKGDTTPLPVTSPSSASTGHTTPLPVTDTSSASTGDTTPLPVTNASSLSTGHATPLHVTSPSSASTGHATPLPVTSTSSASTGHATPLPVTSTSSASTGHATPLPVTDNSSVSTGHATPLPVTGLSSATTDDTTRLPVTDVSSASTGQATPLPVTSLSSVSTGDTTPLPVTSPSSASTGHASPLLVTDASSASTGQATPLPVTDTSSVSTAHATPLPVTGLSSASTDDTTRLPVTDVSSASTGQAIPLPVTSPSSASTGDTTPLPVTDASSASTGDTTSLPVTIPSSASSGHTTSLPVTDASSVSTGHATSLLVTDASSVSTGDTTPLPVTDTNSASTGDTTPLHVTDASSVSTGHATSLPVTSLSSASTGDTTPLPVTSPSSASSGHTTSLPVTDASSVSTGHATSLPVTIPSSASSGHTTPLPVTDASSVPTGHATSLPVTDASSVSTGHATPLPVTDASSVSTGHATPLPVTDTSSVSTGQATPLPVTSLSSASSTGDTTPLPVTDTSSASTGQDTPLPVTSLFSVSTGDTTPLPVTSPSSASTGHATHLLVTDASSVSTGHATSLLVTDASSVSTGHATALHVTDASSLSTGDTTPLPVTSPSSASTGDTTPLPVTDTSSVSTGHATSLPVTDTSSASTGHATSLPVTDTSSASTGQATPLPVTSPSSASTGHAIPLLVTDTSSASTGQATPLPVTSLSSASTGDTTPLPVTDASSVSTGHATSLPVTSLSSVSTGDTTPLPVTSPSSASTGHATPLHVTSPSSASTGHATPLPVTSLSSASTGDTTPLPVTSPSSASTGHATPLHVTDASSVSTGDTTPLPVTSPSSASSGHTTPLPVTDASSASTGDTTPLPVTDTSSASTGHATHLPVTGLSSASTGDTTRLPVTDVSSASTGHATPLPVTSTSSASTGDTTPLPGTDTSSVSTGHTTPLLVTDASSVSTGDTTRLPVTSPSSASTGHTTPLPVTDTPSASTGDTTPLPVTNASSLSTRHATSLHVTSPSSASTGHATPLPVTDTSAASTGHATPLPVTSTSSASTGDTTPLPVTDTSSASTGHATPLPVTNTSSVSTGHATPLHVTSPSSASTGHTTPLPVTDASSVSTGHATSLPVTDASSVSTGHATPLPVTDASSVSTGHATPLPLTSLSSVSTGDTTPLPVTDTSSASTGQATPLPVTSLSSVSTGDTTPLPVTDTSSASTGHATSLPVTDTSSASTGHATPLPVTDTSSISTGHATPLHVTSPSSASTGHATPLPVTDTSSASTGHATPLPVTSLSSVSTGDTTPLPVTSPSSASTGHATPLLVTDASSASTGQATPLPVTSLSSVSTGDTTPLPVTSPSSASTGHATSLPVTDTSSASTGDTTSLPVTDTSSAYTGDTTSLPVTDTSSSSTGDTTPLLVTETSSASTGDTTPVPVTDTSSVSTGHATPLPVTGLSSASTGDTTRLPVTDISSASTGQATPLPVTNTSSVSTGDTMPLPVTSPSSASTGHATPLPVTSTSSASTGHATPVPVTSTSLASTGHTTPLPVTSPSSASTGHTTPLPVTDTSSASTGDTTPLPVTNASSLSTGHTTPLHVTIPSSASTGDTSTLPVTGASSASTGHATPLPVTDTSSVSTGHATPLPVTSFSSVSTGDTTPLPVTDASSASTGHATPLPVTDTSSASTGDTTPLPVTDASSASTGQATPLPVTSLSSVSTGDTTPLPVTIPSSASSGHTTSLPVSDTSSASTGQATPLPVTSLSSVSTGDTTPLLVTDASSVSTGHATPLPVTDTSSASTGDTTRLPVTDTSSASTGQATPLPVTSLSSVSTGDTTPLLVTNTSSVSTGHATSLPVTIPSSSSSGHTTPLPVTSTSSVSTGHVTPLHVTSPSSSSTGQATPLPVTSTSSVSTGHVTPLHVTSPSSASTGHATPLPVTSTSSASTGHATPLPVTDASSVSTGHATPLPVTDTSSASTGDTTPLPVTDTSSASTGQATPLPVTSLSSVSTGHATPLAVSSATSASTVSSDSPLKMETSGMTTPSLKTDGGRRTATSPPPTTSQTIISTIPSTAMHTRSTAAPIPILPERGEAIQEFPSSPMGQTPGTWSSSGGPWTSPPHSSSRRLASPLAPLSVIPSTSQTMARSSSQSQTTRFSPTPTHSQQASQAGTLWPWWLRSGTMLTSPLVGGPHFIRNTRRSMVNTAC

SEQ ID NO: 99746 - protein, 888 aa, Homo sapiens
MSSMSSAEEQFQWQSQDGQKDIEDELTTGLELVDSCIRSLQESGILDPQDYSTGETGSRASYSSQHGHLGPELRALQSPEHHIDPIYEDRVYQKPPMRSLSQSQGDPLPPAHTGTYRTSTAPSSPGVDSVPLQRTGSQHGPQNAAAATFQRASYAAGPASNYADPYRQLQYCPSVESPYSKSGPALPPEGTLARSPSIDSIQKDPREFGWRDPELPEVIQMLQHQFPSVQSNAAAYLQHLCFGDNKIKAEIRRQGGIQLLVDLLDHRMTEVHRSACGALRNLVYGKANDDNKIALKNCGGIPALVRLLRKTTDLEIRELVTGVLWNLSSCDALKMPIIQDALAVLTNAVIIPHSGWENSPLQDDRKIQLHSSQVLRNATGCLRNVSSAGEEARRRMRECDGLTDALLYVIQSALGSSEIDSKTVENCVCILRNLSYRLAAETSQGQHMGTDELDGLLCGEANGKDAESSGCWGKKKKKKKSQDQWDGVGPLPDCAEPPKGIQMLWHPSIVKPYLTLLSECSNPDTLEGAAGALQNLAAGSWKWSVYIRAAVRKEKGLPILVELLRIDNDRVVCAVATALRNMALDVRNKELIGKYAMRDLVHRLPGGNNSNNTASKAMSDDTVTAVCCTLHEVITKNMENAKALRDAGGIEKLVGISKSKGDKHSPKVVKAASQVLNSMWQYRDLRSLYKKDGWSQYHFVASSSTIERDRQRPYSSSRTPSISPVRVSPNNRSASAPASPREMISLKERKTDYECTGSNATYHGAKGEHTSRKDAMTAQNTGISTLYRNSYGAPAEDIKHNQVSAQPVPQEPSRKDYETYQPFQNSTRNYDESFFEDQVHHRPPASEYTMHLGLKSTGNYVDFYSAARPYSELNYETSHYPASPDSWV

SEQ ID NO: 99747 - protein, 55 aa, Homo sapiens
MLAMPIDLDTLSPEERRARLRKREAQLQSRKEYEQELSDDLHVERYRQFWTRTKK

SEQ ID NO: 99748 - protein, 199 aa, Homo sapiens [sequence omitted]

SEQ ID NO: 99749 - protein, 117 aa, Homo sapiens
MRAGPGPTVTLALVLAVSWAMELKPTAPPIFTGRPFVVAWDVPTQDCGPRLKVPLDLNAFDVQASPNEGFVNQNITIFYRDRLGLYPRFDSAGRSVHGGVPQNVSLWAHRKMLQKRV

SEQ ID NO: 99750 - protein, 884 aa, Homo sapiens
MPAERPAGSGGSEAPAMVEQLDTAVITPAMLEEEEQLEAAGLERERKMLEKARMSWDRESTEIRYRRLQHLLEKSNIYSKFLLTKMEQQQLEEQKKKEKLERKKESLKVKKGKNSIDASEEKPVMRKKRGREDESYNISEVMSKEEILSVAKKNKKENEDENSSSTNLCVEDLQKNKDSNSIIKDRLSETVRQNTKFFFDPVRKCNGQPVPFQQPKHFTGGVMRWYQVEGMEWLRMLWENGINGILADEMGLGKTVQCIATIALMIQRGVPGPFLVCGPLSTLPNWMAEFKRFTPDIPTMLYHGTQEERQKLVRNIYKRKGTLQIHPVVITSFEIAMRDRNALQHCYWKYLIVDEGHRIKNMKCRLIRELKRFNADNKLLLTGTPLQNNLSELWSLLNFLLPDVFDDLKSFESWFDITSLSETAEDIIAKEREQNVLHMLHQERIPRMYVSEFTDEGFFEGKLPSRKDLYDIRPYENTYLLKLHTNFEILTPFLLRRLKSDVALEVPPKREVVVYAPLSKKQEIFYTAIVNRTIANMFGSSEKETIELSPTGRPKRRTRKSINYSKIDDFPNELEKLISQIQPEVDRERAVVEVNIPVESEVNLKLQNIMMLLRKCCNHPYLIEYPIDPVTQEFKIDEELVTNSGKFLILDRMLPELKKRGHKVLLFSQMTSMLDILMDYCHLRDFNFSRLDGSMSYSEREKNMHSFNTDPEVFIFLVSTRAGGLGINLTAADTVIIYDSDWNPQSDLQAQDRCHRIGQTKPVVVYRLVTANTIDQKIVERAAAKRKLEKLIIHKNHFKGGQSGLNLSKNFLDPKELMELLKSRDYEREIKGSREKVISDKDLELLLDRSDLIDQMNASGPIKEKMGIFKILENSEDSSPECLF

SEQ ID NO: 99751 - protein, 147 aa, Homo sapiens
MGPEALSSLLLLLLVASGDADMKGHFDPAKCRYALGMQDRTIPDSDISASSSWSDSTAARHSRLESSDGDGAWCPAGSVFPKEEEYLQVDLQRLHLVALVGTQGRHAGGLGKEFSRSYRLRYSRDGRRWMGWKDRWGQEVISGNEDP

SEQ ID NO: 99752 - protein, 326 aa, Homo sapiens
MPHLPLASFRPPFWGLRHSRGLPRFHSVSTQSEPHGSPISRRNREAKQKRLREKQATLEAEIAGESKSPAESIKAWRPKELVLYEIPTKPGEKKDVSGPLPPAYSPRYVEAAWYPWWVREGFFKPEYQARLPQATGETFSMCIPPPNVTGSLHIGHALTVAIQDALVRWHRMRGDQVLWVPGSDHAGIATQAVVEKQLWKERGVRRHELSREAFLREVWQWKEAKGGEICEQLRALGASLDWDRECFTMDVGSSVAVTEAFVRLYKAGLLYRNHQLVNWSCALRSAISDIEVENRPLPGHTQLRLPGCPTPVSFGLLFSVAFPVDG

SEQ ID NO: 99753 - protein, 297 aa, Homo sapiens
MEELVVEVRGSNGAFYKAFVKDVHEDSITVAFENNWQPDRQIPFHDVRFPPPVGYNKDINESDEVEVYSRANEKEPCCWWLAKVRMIKGEFYVIEYAACDATYNEIVTIERLRSVNPNKPATKDTFHKIKLDVPEDLRQMCAKEAAHKDFKKAVGAFSVTYDPENYQLVILSINEVTSKRAHMLIDMHFRSLRTKLSLIMRNEEASKQLESSRQLASRFHEQFIVREDLMGLAIGTHGANIQQARKVPGVTAIDLDEDTCTFHIYGEDQDAVKKARSFLEFAEDVIQVPRNLVGLKI

SEQ ID NO: 99754 - protein, 304 aa, Homo sapiens
MNNQKVVAVLLQECKQVLDQLLLEAPDVSEEDKSEDQRCRALLPSELRTLIQEAKEMKWPFVPEKWQYKQAVGPEDKTNLKDVIGAGLQQLLASLRASILARDCAAAAAIVFLVDRFLYGLDVSGKLLQVAKGLHKLQPATPIAPQVVIRQARISVNSGKLLKAEYILSSLISNNGATGTWLYRNESDKVLVQSVCIQIRGQILQKLGMWYEAAELIWASIVGYLALPQPDKKGLSTSLGILADIFVSMSKNDYEKFKNNPQINLSLLKEFDHHLLSAAEACKLAAAFSAYTPLFVLTAVVLFC

SEQ ID NO: 99755 - protein, 137 aa, Homo sapiens
MGSRTPESPLHAVQLRWGPRRRPPLLPLLLLLLPPPPRVGGFNLDAEAPAVLSGPPGSFFGFSVEFYRPGTDGLSAPGVLTVQLRGRGACGVQVLAVVRGNSSSPWLLHLGMRSTVQLAHREGATERPRGHLLPLHR

SEQ ID NO: 99756 - protein, 985 aa, Homo sapiens
MAVWSLLSARAVTAFLLLFLPRFLQAQTFSFPFQQPEKCDNNQYFDISALSCVPCGANQRQDARGTSCVCLPGFQMISNNGGPAIICKKCPENMKGVTEDGWNCISCPSDLTAEGKCHCPIGHILVERDINGTLLSQATCELCDGNENSFMVVNALGDRCVRCEPTFVNTSRSCACSEPNILTGGLCFSSTGNFPLRRISAARYGEVGMSLTSEWFAKYLQSSAAACWVYANLTSCQALGNMCVMNMNSYDFATFDACGLFQFIFENTAGLSTVHSISFWRQNLPWLFYGDQLGLAPQVLSSTSLPTNFSFKGENQNTKLKFVAASYDIRGNFLKWQTLEGGVLQLCPDTETRLNAAYSFGTTYQQNCEIPISKILIDFPTPIFYDVYLEYTDENQHQYILAVPVLNLNLQHNKIFVNQDSNSGKWLLTRRIFLVDAVSGRENDLGTQPRVIRVATQISLSVHLVPNTINGNIYPPLITIAYSDIDIKDANSQSVKVSFSVTYEMDHGEAHVQTDIALGVLGGLAVLASLLKTAGWKRRIGSPMIDLQTVVKFLVYYAGDLANVFFIITVGTGLYWLIFFKAQKSVSVLLPMPIQEERFVTYVGCAFALKALQFLHKLISQITIDVFFIDWERPKGKVLKAVEGEGGVRSATVPVSIWRTYFVANEWNEIQTVRKINSLFQVLTVLFFLEVVGFKNLALMDSSSSLSRNPPSYIAPYSCILRYAVSAALWLAIGIIQVVFFAVFYERFIEDKIRQFVDLCSMSNISVFLLSHKCFGYYIHGRSVHGHADTNMEEMNMNLKREAENLCSQRGLVPNTDGQTFEIAISNQMRQHYDRIHETLIRKNGPARLLSSSASTFEQSIKAYHMMNKFLGSFIDHVHKEMDYFIKDKLLLERILGMEFMEPMEKSIFYNDEGYSFSSVLYYGNEATLLIFDLLFFCVVDLACQNFILASFLTYLQQEIFRYIRNTVGQKNLASKTLVDQRFLI

SEQ ID NO: 99757 - protein, 121 aa, Homo sapiens
MAGRPLRIGDQLVLEEDYDETYIPSEQEILEFAREIGIDPIKEPELMWLAREGIVAPLPGEWKPCQDITGDIYYFNFANGQSMWDHPCDEHYRSLVIQERAKLSTSGAIKKKKKKKEKKDK

SEQ ID NO: 99758 - protein, 136 aa, Homo sapiens
MLACLPGPGDLSFQLLSHTQMNTGLQKWDTTQKMRTAHYPTPAELDAYAKKVANNPLTIKIFPNSVKVPQRKHVRRTVNGLDTSAQRYSPYPTQAATKAGLLAIVKVPAKSILKDFDGTRARLLPEAIMNPPVAPY

SEQ ID NO: 99759 - protein, 283 aa, Homo sapiens
MRPLQIVPSRLISQLYCGLKPPASTRNQICLKMARPSSSMADFRKFFAKAKHIVIISGAGVSAESGVPTFRGAGGYWRKWQAQDLATPLAFAHNPSRVWEFYHYRREVMGSKEPNAGHRAIAECETRLGKQGRRVVVITQNIDELHRKAGTKNLLEIHGSLFKTRCTSCGVVAENYKSPICPALSGKGAPEPGTQDASIPVEKLPRWALPLWCTQQPCLPPRWLPGACQWLNLTRRPPQLRTDSGFISRDPVERLFLKPLPVMKMKLFLKCPGEERNYSISKN

SEQ ID NO: 99760 - protein, 70 aa, Homo sapiens
MKLLVLAVLLTVAAADSGISPRAVWQFRKMIKCVIPGSDPFLEYNNYGCYCGLGGSGTPVDELDKQKQRV

SEQ ID NO: 99761 - protein, 295 aa, Homo sapiens
MQRGAALCLRLWLCLGLLDGLVSGYSMTPPTLNITEESHVIDTGDSLSISCRGQHPLEWAWPGAQEAPATGDKDSEDTGVVRDCEGTDARPYCKVLLLHEVHANDTGSYVCYYKYIKARIEGTTAASSYVFVRDFEQPFINKPDTLLVNRKDAMWVPCLVSIPGLNVTLRSQSSVLWPDGQEVVWDDRRGMLVSTPLLHDALYLQCETTWGDQDFLSNPFLVHITGNELYDIQLLPRKSLELLVGEKLVLNCTVWAEFNSGVTFDWDYPGKQKIPSSASSGSKDPSWRPRQETSW

SEQ ID NO: 99762 - protein, 1809 aa, Homo sapiens
MSGASVKVAVRVRPFNSRETSKESKCIIQMQGNSTSIINPKNPKEAPKSFSFDYSYWSHTSPEDPCFASQNRVYNDIGKEMLLHAFEGYNVCIFAYGQTGAGKSYTMMGKQEESQAGIIPQLCEELFEKINDNCNEEMSYSVEVSYMEIYCERVRDLLNPKNKGNLRVREHPLLGPYVEDLSKLAVTSYTDIADLMDAGNKARTVAATNMNETSSRSHAVFTIVFTQKKHDNETNLSTEKVSKISLVDLAGSERADSTGAKGTRLKEGANINKSLTTLGKVISALAEVDNCTSKSKKKKKTDFIPYRDSVLTWLLRENLGGNSRTAMVAALSPADINYDETLSTLRYADRAKQIKCNAVINEDPNAKLVRELKEEVTRLKDLLRAQGLGDIIDNLKDFQNNKHRYLLASENQRPGHFSTASMGSLTSSPSSCSLSSQVGLTSVTSIQERIMSTPGGEEAIERLKESEKIIAELNETWEEKLRKTEAIRMEREALLAEMGVAIREDGGTLGVFSPKKTPHLVNLNEDPLMSECLLYYIKDGITRVGQADAERRQDIVLSGAHIKEEHCIFRSERSNSGEVIVTLEPCERSETYVNGKRVSQPVQLRSGNRIIMGKNHVFRFNHPEQARAEREKTPSAETPSEPVDWTFAQRELLEKQGIDMKQEMEKRLQEMEILYKKEKEEADLLLEQQRLDYESKLQALQKQVETRSLAAETTEEEEEEEEVPWTQHEFELAQWAFRKWKSHQFTSLRDLLWGNAVYLKEANAISVELKKKVQFQFVLLTDTLYSPLPPELLPTEMEKTHEDRPFPRTVVAVEVQDLKNGATHYWSLEKLKQRLDLMREMYDRAGEMASSAQDESETTVTGSDPFYDRFHWFKLVGSSPIFHGCVNERLADRTPSPTFSTADSDITELADEQQDEMEDFDDEAFVDDAGSDAGTEEGSDLFSDGHDPFYDRSPWFILVGRAFVYLSNLLYPVPLIHRVAIVSEKGEVRGFLRVAVQAIAADEEAPDYGSGIRQSGTAKISFDNEYFNQSDFSSVAMTRSGLSLEELRIVEGQGQSSEVITPPEEISRINDLDLKSSTLLDGKMVMEGFSEEIGNHLKLGSAFTFRVTVLQASGILPEYADIFCQFNFLHRHDEAFSTEPLKNNGRGSPLAFYHVQNIAVEITESFVDYIKTKPIVFEVFGHYQQHPLHLQGQELNSPPQPCRRFFPPPMPLSKPVPATKLNTMSKTSLGQSMSKYDLLVWFEISELEPTGEYIPAVVDHTAGLPCQGTFLLHQGIQRRITVTIIHEKGSELHWKDVRELVVGRIRNKPEVDEAAVDAILSLNIISAKYLKSSHNSSRTFYRFEAVWDSSLHNSLLLNRVTPYGEKIYMTLSAYLELDHCIQPAVITKDVCMVFYSRDAKISPPRSLRSLFGSGYSKSPDSNRVTGIYELSLCKMSDTGSPGMQRRRRKILDTSVAYVRGEENLAGWRPRGDSLILEHQWELEKLELLHEVEKTRHFLLLRERLGDSIPKSLSDSLSPSLSSGTLSTSTSISSQISTTTFESAITPSESSGYDSGDIESLVDREKELATKCLQLLTHTFNREFSQVHGSVSDCKLSDISPIGRDPSESSFSSATLTPSSTCPSLVDSRSNSLDQKTPEANSRASSPCPEFEQFQIVPAVETPYLARAGKNEFLNLVPDIEEIRPSSVVSKKGYLHFKEPLYSNWAKHFVVVRRPYVFIYNSDKDPVERGIINLSTAQVEYSEDQQAMVKTPNTFAVCTKHRGVLLQALNDKDMNDWLYAFNPLLAGTIRPGHLASEIIREDKSVSFSCQ

SEQ ID NO: 99763 - protein, 212 aa, Homo sapiens
WALRPVLPTQSAHDPPAVHLSNGPGQEPIAVMTFDLTKITKTSSSFEVRTWDPEGVIFYGDTNPKDDWFMLGLRDGRPEIQLHNHWAQLTVGAGPRLDDGRWHQLVPALDGCLRRDSWLDKQAEISASAPTSLRSCDVESNPGIFLPPGTQAEFNLRDIPQPHAEPWAFSLDLGLKQAAGSGHLLALGTPENPSWLSLHLQDQEKTLPPLFA

SEQ ID NO: 99764 - protein, 297 aa, Homo sapiens
MASDEGKLFVGGLSFDTNEQSLEQVFSKYGQISEVVVVKDRETQRSRGFGFVTFENIDDAKDAMMAMNGKSVDGRQIRVDQAGKSSDNRSRGYRGGSAGGRGFFRGGRGRGRGFSRGGGDRGYGGNRFESRSGGYGGSRDYYSSRSQSGGYSDRSSGGSYRDSYDSYGKSHSEGATLLWPAVGARFTLVPSPSTLGWTLRPCHCACPEEAHLSSQSHFYRRTQKPNETDQKGKGERGPAGQSARCMCGRRPASLGCGGWLLPGRRPRPGLASGVKLPLVASVPLHCACFLSSATHNE

SEQ ID NO: 99765 - protein, 183 aa, Homo sapiens
MRLDGLTPPALPRCVSTMFSFTGMWRYFDVGLHNFLIRYVYIPVGGSQHGLLGTLFSTAMTFAFVSYWHGGYDYLWCWAALNWLGVTVENGVRRLVETPCIQDSLARYFSPQARRRFHAALASCSTSMLILSNLVFLGGNEVGKTYWNRIFIQGWPWVTLSVLGFLYCYSHVGIAWAQTYATD

SEQ ID NO: 99766 - protein, 71 aa, Homo sapiens
MAFPEPKPRPPELPQKRLKTLDCGQGAVRAVRFNVDGNYCLTCGSDKTLKLWNPLRGTLLRTYSGHGYELL

SEQ ID NO: 99767 - protein, 30 aa, Homo sapiens
LDQVIRQRSLSSLELFLSCAQKQPRLTTGN

SEQ ID NO: 99768 - protein, 216 aa, Homo sapiens
MQAGKPILYSYFRSSCSWRVRIALALKGIDYETVPINLIKDGGQQFSKDFQALNPMKQVPTLKIDGITIHQSLAIIEYLEEMRPTPRLLPQDPKKRASVRMISDLIAGGIQPLQNLSVLKQVGEEMQLTWAQNAITCGFNALEQILQSTAGIYCVGDEVTMADLCLVPQVANAERFKVDLTPYPTISSINKRLLVLEAFQVSHPCRQPDTPTELRA

SEQ ID NO: 99769 - protein, 135 aa, Homo sapiens
MLRRALLCLAVAALVRADAPEEEDHVLVLRKSNFAEALAAHKYLLVEFYAPWCGHCKALAPEYAKAAGKLKAEGSEIRLAKVDATEESDLAQQYGVRGYPTIKFFRNGDTASPKEYTGRGVGLCQAVFAGSRGHR

SEQ ID NO: 99770 - protein, 456 aa, Homo sapiens
MPAPRAREQPRVPGERQPLLPRGARGPRRWRRAAGAAVLLVEMLERAAFFGVTANLVLYLNSTNFNWTGEQATRAALVFLGASYLLAPVGGWLADVYLGRYRAVALSLLLYLAASGLLPATAFPDGRSSFCGEMPASPLGPACPSAGCPRSSPSPYCAPVLYAGLLLLGLAASSVRSNLTSFGADQVMDLGRDATRRFFNWFYWSINLGAVLSLLVVAFIQQNISFLLGYSIPVGCVGLAFFIFLFATPVFITKPPMGSQVSSMLKLALQNCCPQLWQRHSARDRQCARVLADERSPQPGASPQEDIANFQVLVKILPVMVTLVPYWMVYFQMQSTYVLQGLHLHIPNIFPANPANISVALRAQGSSYTESWRWSAYTTSTTTRPCPSRLGRSCTTRHHCPSGGRSLSTCSLGSVRSLPASQAWSLPTQRPRAPCRAPSWASSSACRGWAHCWAPA

SEQ ID NO: 99771 - protein, 65 aa, Homo sapiens
MEIIRSNFKSNLHKVYQAIEEADFFAIDGEFSGISDGPSVSALTNGFDTPEERYQKLKKVYNEVI

SEQ ID NO: 99772 - protein, 417 aa, Homo sapiens
MAAMLKCVMSGSQVKVFGKAVQALSRISDEFWLDPSKKGLALRCVNSSRSAYGCVLFSPVFFQHYQWSALVKMSENELDTTLHLKCKLGMKSILPIFRCLNSLERNIEKCRIFTRSDKCKVVIQFFYRHGIKRTHNICFQESQPLQVIFDKNVCTNTLMIQPRLLADAIVLFTSSQEEVTLAVTPLNFCLKSSNEESMDLSNAVHSEMFVGSDEFDFFQIGMDTEITFCFKELKGILTFSEATHAPISIYFDFPGKPLALSIDDMLVEANFILATLADEQSRASSPQSLCLSQKRKRSDLIEKKAGKNVTGQALECISKKAAPRRLYPKETLTNISALENCGSPAMKRVDGDVSEVSESSVSNTEEVPGSLCLRKFSCMFFGAVSSDQQEHFNHPFDSLARASDSEEDMNNGSFSIF

SEQ ID NO: 99773 - protein, 530 aa, Homo sapiens
MLSRLRVVSTTCTLACRHLHIKEKGKPLMLNPRTNKGMAFTLQERQMLGLQGLLPPKIETQDIQALRFHRNLKKMTSPLEKYIYIMGIQERNEKLFYRILQDDIESLMPIVYTPTVGLACSQYGHIFRRPKGLFISISDRGHVRSIVDNWPENHVKALLKDPFYMGLYQKRDRTQQYDDLIDEFMKAITDRYGRNTLIQFEDFGNHNAFRFLRKYREKYCTFNDDIQGTAAVALAGLLAAQKVISKPISEHKILFLGAGEAALGIANLIVMSMVENGLSEQEAQKKIWMFDKYGLLVKGRKAKIDSYQEPFTHSAPESIPDTFEDAVNILKPSTIIGVAGAGRLFTPDVIRAMASINERPVIFALSNPTAQAECTAEEAYTLTEGRCLFASGSPFGPVKLTDGRVFTPGQGNNVYIFPGVALAVILCNTRHISDSVFLEAAKALTSQLTDEELAQGRLYPPLANIQEVSINIAIKVTEYLYANKMAFRYPEPEDKAKYVKERTWRSEYDSLLPDVYEWPESASSPPVITE

SEQ ID NO: 99774 - protein, 160 aa, Homo sapiens
MQDKEKIREKYGPEWARLPPAQQDEIIDRCLVGPRAPAPRDPGDSEELTRFPGLRGPTGQKVVRFGDEDLTWQDEHSAPFSWETKSQMEFSISALSIQEPSNGTAASEPRPLSKASQGSQALKSSQGSRSSSLDALGPTRKEEEASFWKINAERSRGEGP

SEQ ID NO: 99775 - protein, 163 aa, Homo sapiens
MVKSLERENIRKMQVAGLGPNQDPLLSGWVPGPSLSHHATPCTAAASPQTGCGRPWGRRGGLGQDFGSFGGSDEIRVPLPCARLFSAPSSPGQERPRRQGLMFRCSASCCEDSQASMKQVHQCIERCHVPLAQAQALVTSELEKFQDRLARCTMHCNDKAKDS

SEQ ID NO: 99776 - protein, 46 aa, Homo sapiens
MSDTLTADVIGRRVEVNGEHATVRFAGVVPPVAGTRQEDPLFVRTR

SEQ ID NO: 99777 - protein, 149 aa, Homo sapiens
MADKVRRQRPRRRVCWALVAVLLADLLALSDTLAVMSVDLGSESMKVAIVKPGVPMEIVLNKESRRKTPVIVTLKENERFFGDSAASMAIKNPKATLRYFQHLLGKQADNPHVALYQARFPEHELTFDPQRQTVHFQISSQLQFSPEEV

SEQ ID NO: 99778 - protein, 81 aa, Homo sapiens
MASEGTNIPSPVVRQIDKQFLICSICLERYKNPKVLPCLHTFCESVPPDLHPARERGGRAPEQFLHHKPDGRAAANSRQQR

SEQ ID NO: 99779 - protein, 201 aa, Homo sapiens
MERRRLWGSIQSRYISMSVWTSPRRLVELAGQSLLKDEALAIAALELLPRELFPPLFMAAFDGRHSQTLKAMVQAWPFTCLPLGVLMKGQHLHLETFKAVLDGLDVLLAQEVRPRRWKLQVLDLRKNSHQDFWTVWSGNRASLYSFPEPEAAQPMTKKRKVDGLSTEAEQPFIPVEVLVDLFLKEGACDELFSYLIEKVKR

SEQ ID NO: 99780 - protein, 166 aa, Homo sapiens
MAMMVFPREEKLSQDEIVLGTKAVIQGLETLRGEHRALLAPLVAPEAGEAEPGSQERCILLRRSLEAIELGLGEAQVILALSSHLGAVESEKQKLRAQVRRLVQENQWLREELAGTQQKLQRSEQAVAQLEEEKQHLLFMSQIRKLDEDASPNEEKGDVPKDTLDD

SEQ ID NO: 99781 - protein, 69 aa, Homo sapiens
QELIDLRGPVPGDLSQTSEDQSLSDFEISNRALINVWIPSVFLRGKAANAFHVYQLFKNVKIILSLWAV

SEQ ID NO: 99782 - protein, 146 aa, Homo sapiens
MRMTMEEMKNEAETTSMVSMPLYAVMYPVFNELERVNLSAAQTLRAAFIKAEKENPGLTQDIIMKILEKKSVEVNFTESLLRMAADDVEEYMIERPEPEFQDLNEKARALKQILSKIPDEINDRVRFLQTIKDIASAIKELLDTVN

SEQ ID NO: 99783 - protein, 90 aa, Homo sapiens
MGSRNSSSAGSGSGDPSEGLPRRGAGLRRSEEEEEEDEDVDLAQALLDSEEENDRAWDGRLGDRYNPPVDATPDTRELEFNEIKTQVELA

SEQ ID NO: 99784 - protein, 110 aa, Homo sapiens
MSAARPQFSIDDAFELSLEDGGPGPESSGVARFGPLHFERRARFEVADEDKQSRLRYQNLENDEDGAQASPEPDGGVGTRLGPAPSGPSAPSAAAPSAPTTPAAAGPNTL

SEQ ID NO: 99785 - protein, 173 aa, Homo sapiens
ERNAFLESELDEKENLLESVQRLKDEARDLRQELAVQQKQEKPRTPMPSSVEAERTDTAVQATGSVPSTPIAHRGPSSSLNTPGSFRRGLDDSTGGTPLTPAARISALNIVGDLLRKVGALESKLASCRNLVYDQSPNRTGGPASGRSSKNRDGGERRPSSTSVPLGDKGREN

SEQ ID NO: 99786 - protein, 260 aa, Homo sapiens
WRRHICIRNIRRSYYSYSYYLKLAKKRKDAMGNTRQEMTHMVNAMDRSYADQSTLHAEDPLSITFMDQHNFSPRLPNDPLVPTAVLVPITDENHSATAESSRLLDVPRYLCEGTESPYQTGQLHPAIRVADLLQHINLMKTSDSYGFKEEYESFFEGQSASWDVAKKDQNRAKNRYGNIIAYDHSRVILQPVEDDPSSDYINANYIDGYQRPSHYIATQGPVHETVYDFWRMIWQEQSACIVMVTNLVEVGRVKCYKYWP

SEQ ID NO: 99787 - protein, 776 aa, Homo sapiens
MSTRTPLPTVNERDTENHTSHGDGRQEVTSRTSRSGARCRNSIASCADEQPHIGNYRLLKTIGKGNFAKVKLARHILTGREVAIKIIDKTQLNPTSLQKLFREVRIMKILNHPNIVKLFEVIETEKTLYLIMEYASGGEVFDYLVAHGRMKEKEARSKFRQGCQAGQTIKVQVSFDLLSLMFTFIVSAVQYCHQKRIVHRDLKAENLLLDADMNIKIADFGFSNEFTVGGKLDTFCGSPPYAAPELFQGKKYDGPEVDVWSLGVILYTLVSGSLPFDGQNLKELRERVLRGKYRIPFYMSTDCENLLKRFLVLNPIKRGTLEQIMKDRWINAGHEEDELKPFVEPELDISDQKRIDIMVGMGYSQEEIQESLSKMKYDEITATYLLLGRKSSELDASDSSSSSNLSLAKVRPSSDLNNSTGQSPHHKVQRSVSSSQKQRRYSDHAGPAIPSVVAYPKRSQTSTADSDLKEDGISSRKSSGSAVGGKGIAPASPMLGNASNPNKADIPERKKSSTVPSSNTASGGMTRRNTYVCSERTTADRHSVIQNGKENSTIPDQRTPVASTHSISSAATPDRIRFPRGTASRSTFHGQPRERRTATYNGPPASPSLSHEATPLSQTRSRGSTNLFSKLTSKLTRRNMSFRFIKRLPTEYERNGRYEGSSRNVSAEQKDENKEAKPRSLRFTWSMKTTSSMDPGDMMREIRKVLDANNCDYEQRERFLLFCVHGDGHAENLVQWEMEVCKLPRLSLNGVRFKRISGTSIAFKNIASKIANELKL

SEQ ID NO: 99788 - protein, 61 aa, Homo sapiens
MEAEVDKLELMFQKAESDLDYIQYRLEYEIKTNHPDSASETESHSVVQTGVQWHDHGSLQL

SEQ ID NO: 99789 - protein, 169 aa, Homo sapiens
MAGQGLPLHVATLLTGLLECLGFAGVLFGWPSLVFVFKNEDYFKDLCGPDAGPIGNATGQADCKAQDERFSLIFTLGSFMNNFMTFPTGYIFDRFKTTVARLIAIFFYTTATLIIAFTSAGSAVLLFLAMPMLTIGGILFLITNLQIGNLFGQHRSTIITLYNGAFDSS

SEQ ID NO: 99790 - protein, 95 aa, Homo sapiens
MVSGRFYLSCLLLGSLGSMCILFTIYWMQYWRGGFAWNGSIYMFNWHPVLMVAGMVVFYGGAGWASPLSSSSPASGSWALLSSSCPGRPCGCAAS

SEQ ID NO: 99791 - protein, 48 aa, Homo sapiens
MLRLPTVFRQMRPVSRVLAPHLTRAYAKDVKFGADARALMLQGKNSDY

SEQ ID NO: 99792 - protein, 170 aa, Homo sapiens
  MOD_RES (1)..(1): Any amino acid
XAVSDPSSPQYGKYLTLENVADLVRPSPLTLHTVQKWLLAAGAQKCHSVITQDFLTCWLSIRQAELLLPGAEFHHYVGGPTETHVVRSPHPYQLPQALAPHVDFGDSGAGCWSVSGRHQFRPTFPASSPYVTTVGGTSFQEPFLITNEIVDYISGGGFSNVFPRPSYQEE

SEQ ID NO: 99793 - protein, 255 aa, Homo sapiens
MPVKGGTKCIKYLLFGFNFIFWLKSLRVPERKAGRSGAPLFGPRPRRTVLAGIAVLAIGLWLRFDSQTKSIFEQETNNNNSSFYTGVYILIGAGALMMLVGFLGCCGAVQESQCMLGLFFGFLLVIFAIEIAAAIWGYSHKDEVIKEVQEFYKDTYNKLKTKDEPQRETLKAIHYALNCCGLAGGVEQFISDICPKKDVLETFTVKSCPDAIKEVFDNKFHIIGAVGIGIAVVMIFGMIFSMILCCAIRRNREMV

SEQ ID NO: 99794 - protein, 120 aa, Homo sapiens
MAREDSVKCLRCLLYALNLLFWLMSISVLAVSAWMRDYLNNVLTLTAETRVEEAVILTYFPVVHPVMIAVCCFLIIVGMLGYCGTVKRNLLLLAWYFGSLLVIFCVELACGVWTYEQELM

SEQ ID NO: 99795 - protein, 293 aa, Homo sapiens
MAELTALESLIEMGFPRGRAEKALALTGNQGIEAAMDWLMEHEDDPDVDEPLETPLGHILGREPTSSEQGGLEGSGSAAGEGKPALSEEERQEQTKRMLELVAQKQREREEREEREALERERQRRRQGQELSAARQRLQEDEMRRAAEERRREKAEEQRVREKIERDKAERAKKYGGSVGSQPPPVAPEPGPVPSSPSQEPPTKREYDQCRIQVRLPDGTSLTQTFRAREQLAAVRLYVELHRGEELGGGQDPVQLLSGFPRRAFSEADMERPLQELGLVPSAVLIVAKKCPS

SEQ ID NO: 99796 - protein, 53 aa, Homo sapiens
MREYKLVVLGSGGVGKSALTVQFVQGIFVEKYDPTIEDSYRKQVEVDAQQCML

SEQ ID NO: 99797 - protein, 294 aa, Homo sapiens
MDGTETRQRRLDSCGKPGELGLPHPLSTGGLPVASEDGALRAPESQSVTPKPLETEPSRETTWSIGLQVTVPFMFAGLGLSWAGMLLDYFQHWPVFVEVKDLLTLVPPLVGLKGNLEMTLASRLSTAVSGHLDIRGGHNVRQANTGQIDDPQEQHRVISSNLALIQVQATVVGLLAAVAALLLGVVSREEVDVAKVELLCASSVLTAFLAAFALGVLMVCIVIGARKLGVNPDNIATPIAASLGDLITLSILALVSSFFYRHKDSRYLTPLVCLSFAALTPVWVLIAKQSPPIV

SEQ ID NO: 99798 - protein, 119 aa, Homo sapiens
MENSTTTISREELEELQEAFNKIDIDNSGYVSDYELQDLFKEASLPLPGYKVREIVEKILSVADSNKDGKISFEEFVSLMQELKSKDISKTFRKIINKREGITAIGGTSTISSEGTQHS

SEQ ID NO: 99799 - protein, 360 aa, Homo sapiens
MELSGATMARGLAVLLVLFLHIKNLPAQAADTCPEVKVVGLEGSDKLTILRGCPGLPGAPGPKGEAGVIGERGERGLPGAPGKAGPVGPKGDRGEKGMRGEKGDAGQSQSCATGPRNCKDLLDRGYFLSGWHTIYLPDCRPLTVLCDMDTDGGGWTVFQRRMDGSVDFYRDWAAYKQGFGSQTHSHDAHSCPFAPSSVKPPHAHNLTRGRIMFLNMFTLGQKSFTSFNVCFLNTSGFDHFPVSVARQVFPWNLVSREESGPLFSRWHYRCSGRLSDFCEDFPPPVIDTGRSSPPPPSLPHPPMPHSQHFTLLEKGHFGVQKTLTKKGESLVGTFLLPTTAEFMLWAGWLLGRDKHLALTK

SEQ ID NO: 99800 - protein, 214 aa, Homo sapiens
MLTEIEHKVAFLLETCKDQGLGDNGATQHEAEALSLKLKTVKCNLEKVQMMLQEKHSEDQHPTILKKSSEPEHQEALQPVNLSELESIVTERPQFSRQKDFQQQQVLELKPMEQKDFIKFIEFNAKKMWPQYCQHDNDTTQESSASNQASSPENDVPDSILSPQGQNGDKWQYLHHELSSKIKLPLPQLVEPQVSLYLHGANSLFIFENPTSIH

SEQ ID NO: 99801 - protein, 76 aa, Homo sapiens
MARGAALALLLFGLLGVLVAAPGFGDLRLQAARGGRPGVACHSHALRPGPKFGIARSLRPGWWGEGKEKLEKNFEP

SEQ ID NO: 99802 - protein, 110 aa, Homo sapiens
MSLQDSTLSREGKPEGEIMAAVFFSVGRLSPEVTQPDEDLHLQAEETQLVKESVTFKDVAIDFTLEEWRLMDPTQRNLHKDVMLENYRNLVSLGLAVSKPDMISHLENGK

SEQ ID NO: 99803 - protein, 216 aa, Homo sapiens
MSLHFLYYCSEPTLDVKIAFCQGFDKQVDVSYIAKHYNMSKSKVDNQFYSVEVGDSTFTVLKRYQNLKPIGSGAQGIVCAAYDAVLDRNVAIKKLSRPFQNQTHAKRAYRELVLMKCVNHKNPPPQIYDKQLDEREHTIEEWKELIYKEVMNSEEKTKNGVVKGQPSPSGAAVNSSESLPPSSSVNDISSMSTDQTLASDTDSSLEASAGPLGCCR

SEQ ID NO: 99804 - protein, 311 aa, Homo sapiens
MMPEFSPQQVWEKFLSSETPRINVFMAVPTIYTKLMEYYDRHFTQPHAQDFLRAVCEEKIRLMVSGSAALPLPVLEKWKNITGHTLLERYGMTEIGMALSGPLTTAVRLPGSVGTPLPGVQVRIVSENPQREACSYTIHAEGDERGTKVTPGFEEKEGELLVRGPSVFREYWNKPEETKSAFTLDGWFKTGDTVVFKDGQYWIRGRTSVDIIKTGGYKVSALEVEWHLLAHPSITDVAVIGVPDMTWGQRVTAVVTLREGHSLSHRELKEWARNVLAPYAVPSELVLVEEIPRNQMGKIDKKALIRHFHPS

SEQ ID NO: 99805 - protein, 156 aa, Homo sapiens
MELATRYQQDVRFHSKYFTEELRRIFIEDTDSETEDFAGFTQSDLNGKTNPEVMVVESDLSDDGKASLVSEEEEDEEEDKATPRRSRSRRSSIGLRVAFQFPTKKLANKPDKNSSSEQLFSSARLQNEKKTILERKKDCRQVIQREDSTSESEDDS

SEQ ID NO: 99806 - protein, 152 aa, Homo sapiens
MASGDFCSPGEGMEILQQVCSKQLPPCNLSKEDLLQNPYFSKLLLNLSQHVDESGLSLTLAKEQAQAWKEVRLHKTTWLRSEILHRVIQELLVDYYVKIQDTNVTSEDKKDFVWMRARLQQEVEEQLKKKCFTLLCYYDPNSGASPLPHFAA

SEQ ID NO: 99807 - protein, 55 aa, Homo sapiens
  MOD_RES (1)..(1): Any amino acid
XLKSLLNNSKLEQTRLEAEFSKLKEQYQQLDITSTKLNNQCEQGSESLSGSPQAT

SEQ ID NO: 99808 - protein, 77 aa, Homo sapiens
MDSFGQPRPEDNQSVVRRMQKKYWKTKQVFIKATGKKEDEHLVASDAELDAKLEIGPVYSSVSSEARSSNIQSKGSI

SEQ ID NO: 99809 - protein, 272 aa, Homo sapiens
  MOD_RES (1)..(1): Any amino acid
XPDKKPQAKQLQTRADYLIKLLSRDLAKKEALSGAGSSKRRKARAKKNKAMKSIKVKEEIKSDSSPLPSEKSDEDDDKDEISSVKHPNKKIKTERDSEEKPEPDVYIKKEPEEKREAKEKENKKELKREIKEKEDKKDIKEKDFKEKRENKVKEAIQKEKDIKEEKLSESKSDGRERSKKSSVSDAPVHITASGEPVPISEESEELDQKTFSICKERMRPVKAALKQLDRPEKGLSEREQLEHTRQCLIKIGDHITECLKEYTNPEQIKQWR

SEQ ID NO: 99810 - protein, 269 aa, Homo sapiens
MLRCADTQVTILGRLHSQVPRNRRQGTQGHAGAARRPGGGRVVRKTWARAFIMRRRGRGEAQELPAPTPSSRHCEQDWPPDSSEEGLPRPRSPCSDGRRDAAARVLQAQWKVYKHKKKKAVLDEAAVVLQAAFRGHLTRTKLLASKAHGSEPPSVPGLPDQSSPVPRVPSPIAQATGSPVQEEAIVIIQSALRAHLARARHSATGKRTTTAASTRRRSASATHGDASSPPFLAALPGNFIHLDSGTRAAGLLRSQPKSGHLQEARAVSG

SEQ ID NO: 99811 - protein, 184 aa, Homo sapiens
  MOD_RES (1)..(1): Any amino acid
XGTARYASINAHLGIEQSRRDDMESLGYVLMYFNRTSLPWQGLKAATKKQKYEKISEKKMSTPVEVLCKGFPAEFAMYLNYCRGLRFEEAPDYMYLRQLFRILFRTLNHQYDYTFDWTMLKQKAAQQAASSSGQGQQAQTPTGKQTDKTKSNMKGNADESARVGLWSSGVHVSKTAGPSNSATC

SEQ ID NO: 99812 - protein, 382 aa, Homo sapiens
MALNHTALPQDERLPHYLRDGDPFASKLSWEADLVAGFYLTIIGILSTFGNGYVLYMSSRRKKKLRPAEIMTINLAVCDLGISVVGKPFTIISCFCHRWVFGWIGCRWYGWAGFFFGCGSLITMTAVSLDRYLKICYLSYGVWLKRKHAYICLAAIWAYASFWTTMPLVGLGDYVPEPFGTSCTLDWWLAQASVGGQVFILNILFFCLLLPTAVIVFSYVKIIAKVKSSSKEVAHFDSRIHSSHVLEMKLTKVAMLICAGFLIAWIPYAVVSVWSAFGRPDSIPIQLSVVPTLLAKSAAMYNPIIYQVIDYKFACCQTGGLKATKKKSLEGFRLHTVTTVRKSSAVLEIHEEGRNKSASPNNLDADSHSNDDDCGKKYEPIF

SEQ ID NO: 99813 - protein, 142 aa, Homo sapiens
MTTDDLCQALLRHYSAKKYQGKEENSDVPRRKRKVLHLVSQWIALYKDWLPEDEHSKMFLKTIYRNVLDDVYEYPILEKELKEFQKILGMHRRHTVDEYSPQKKNKALFHQFSLKENWLQHRGTVTETEEIFCHVYITEHSY

SEQ ID NO: 99814 - protein, 730 aa, Homo sapiens
MLLLLLLLLLLPPLVLRVAASRCLHDETQKSVSLLRPPFSQLPSKSRSSSLTLPSSRDPQPLRIQSCYLGDHISDGAWDPEGEGMRGGSRALAAVREATQRIQAVLAVQGPLLLSRDPAQYCHAVWGDPDSPNYHRCSLLNPGYKGESCLGAKIPDTHLRGYALWPEQGPPQLVQPDGPGVQNTDFLLYVRVAHTSKCHQEPSVIAYAACCQLDSEDRPLAGTIVYCAQHLTSPSLSHSDIVMATLHELLHALGFSGQLFKKWRDCPSGFSVRENCSTRQLVTRQDEWGQLLLTTPAVSLSLAKHLGVSGASLGVPLEEEEGLLSSHWEARLLQGSLMTATFDGAQRTRLDPITLAAFKDSGWYQVNHSAAEELLWGQGSGPEFGLVTTCGTGSSDFFCTGSGLGCHYLHLDKGSCSSDPMLEGCRMYKPLANGSECWKKENGFPAGVDNPHGEIYHPQSRCFFANLTSQLLPGDKPRHPSLTPHLKEAELMGRCYLHQCTGRGAYKVQVEGSPWVPCLPGKVIQIPGYYGLLFCPRGRLCQTNEDINAVTSPPVSLSTPDPLFQLSLELAGPPGHSLGKEQQEGLAEAVLEALASKGGTGRCYFHGPSITTSLVFTVHMWKSPGCQGPSVATLHKALTLTLQKKPLEVYHGGANFTTQPSKLLVTSDHNPSMTHLRLSMGLCLMLLILVGVMGTTAYQKRATLPVRPSASYHSPELHSTRVPVRGIREV

SEQ ID NO: 99815 - protein, 58 aa, Homo sapiens
MSVAFAAPRQRGKGEITPAAIQKMLDDNNHLIQCIMDSQNKGKTSECSQVSPNYSRVA

SEQ ID NO: 99816 - protein, 137 aa, Homo sapiens
MEAMSENKMVPSEFSTGPVEKAAKPLPFKDPNFVHSGHGGAVAGKKNRTWKNLKQILASERALPWQLNDPNYFSIDAPPSFKPAKKYSDVSGLLANYTDPQSKLRFSTIEEFSYIRRLPSDVVTGYLALRKATSIVP

SEQ ID NO: 99817 - protein, 219 aa, Homo sapiens
MDNYADLSDTELTTLLRRYNIPHGPVVDLNSTRGDADMYDLPKKEDALLYQSKGYNDDYYEESYFTTRTYGEPESAGPSRAVRQSVTSFPDADAFHHQVHDDDLLSSSEEECKDRERPMYGRDSAYQSITHYRPVSASRSSLDLSYYPTSSSTSFMSSSSSSSSWLTRRAIRPENRAPGAGLGQDRQVPLWGQLLLFLVFVIVLFFIYHFMQAEEGNPF

SEQ ID NO: 99818 - protein, 264 aa, Homo sapiens
MTDVPATFTQAECNGDKPPENGQQTITKISEELTDVDSPLPHYRVEPSLEGALTKGSQEERRKLQGNMLLNSSMEDKMLKETSADEMTFREGHQWEKIPLSGSNQEIRRQKERITEQPLKEEEDEDRKNKGHQAAEIEWLGFRKPSQADMLHSKHDEEQKVWDEEIDDDDDDNCNNDEDEVRVIEFKKKHEEVSQFKEEGDASEDSPLSSASSQAVTPDEQPTLGKKSDISRNAYSRYNTISYRKIRKGNTKQRIDEFESMMHL

SEQ ID NO: 99819 - protein, 1145 aa, Homo sapiens
MRRRYEDDGISDDEIEGKRTFDLEEKLHTNKYNANFVTFMEGKDFNVEYIQRGGLRDPLIFKNSDGLGIKMPDPDFTVNDVKMCVGSRRMVDVMDVNTQKGIEMTMAQWTRYYETPEEEREKLYNVISLEFSHTRLENMVQRPSTVDFIDWVDNMWPRHLKESQTESTNAILEMQYPKVQKYCLMSVRGCYTDFHVDFGGTSVWYHIHQGGKVFWLIPPTAHNLELYENWLLSGKQGDIFLGDRVSDCQRIELKQGYTFVIPSGWIHAVYTPTDTLVFGGNFLHSFNIPMQLKIYNIEDRTRVPNKFRYPFYYEMCWYVLERYVYCITNRSHLTKEFQKESLSMDLELNGLESGNGDEEAVDREPRRLSSRRSVLTSPVANGVNLDYDGLGKTCRSLPSLKKTLAGDSSSDCSRGSHNGQVWDPQCAPRKDRQVHLTHFELEGLRCLVDKLESLPLHKKCVPTGIEDEDALIADVKILLEELANSDPKLALTGVPIVQWPKRDKLKFPTRPKVRVPTIPITKPHTMKPAPRLTPVRPAAASPIVSGARRRRVRCRKCKACVQGECGVCHYCRDMKKFGGPGRMKQSCVLRQCLAPRLPHSVTCSLCGEVDQNEETQDFEKKLMECCICNEIVHPGCLQMDGEGLLNEELPNCWECPKCYQEDSSEKAQKRKMEESDEEAVQAKVLRPLRSCDEPLTPPPHSPTSMLQLIHDPVSPRGMVTRSSPGAGPSDHHSASRDERFKRRQLLRLQATERTMVREKENNPSGKKELSEVEKAKIRGSYLTVTLQRPTKELHGTSIVPKLQAITASSANLRHSPRVLVQHCPARTPQRGDEEGLGGEEEEEEEEEEEDDSAEEGGAARLNGRGSWAQDGDESWMQREVWMSVFRYLSRRELCECMRVCKTWYKWCCDKRLWTKIDLSRCKAIVPQALSGIIKRQPVSLDLSWTNISKKQLTWLVNRLPGLKDLLLAGCSWSAVSALSTSSCPLLRTLDLRWAVGIKDPQIRDLLTPPADKPGQDNRSKLRNMTDFRLAGLDITDATLRLIIRHMPLLSRLDLSHCSHLTDQSSNLLTAVGSSTRYSLTELNMAGCNKLTDQTLIYLRRIANVTLIDLRGCKQITRKACEHFISDLSINSLYCLSDEKLIQKIS

SEQ ID NO: 99820 - protein, 66 aa, Homo sapiens
MQNDAGEFVDLYVPRKCSASNRIIGAKDHASIQMNVAEVSWEPGRREGCDICAGKAGCPIVEEPLG

SEQ ID NO: 99821 - protein, 153 aa, Homo sapiens
MGLGQPQAWLLGLPTAVVYGSLALFTTILHNVFLLYYVDTFVSVYKINKMAFWVGETVFLLWNSLNDPLFGWLSDRQFLSSQPRLCGEELLVGSEEADSITLGRYLRQLARHRNFLWFVSMDLVQVQWLTPVIPALRDAKVERPLEPRSSRLQ

SEQ ID NO: 99822 - protein, 124 aa, Homo sapiens
MPIVMARDLEETASSSEDEEVISQEDHPCIMWTGGCRRIPVLVFHADAILTKDNNIRVIGERYHLSYKIVRTDSRLVRSILTAHGFHEVHPSSTDYNLMWTGSHLKPFLLRTLSEAQKVNHFPR

SEQ ID NO: 99823 - protein, 268 aa, Homo sapiens
MDADEGQDMSQVSGKESPPVSDTPDEGDEPMPIPEDLSTTSGGQQSSKSDRVVVTYGADDFRDFHAIIPKSFSRERPFQCNQCGASFTQKGNLLRHIKLHKPLAEGTPRSNHSAQDSAVENLLLLSKAKLVPSEREASPSNSCQDSTDTESNNEEQRSGLIYLTNHIAPHARNGLSLKEEHRAYDLLRAASENSQDALRVVSTSGEQMKVYKCEHCRVLFLDHVMYTIHMGCHGFRDPFECNMCGYHSQDRYEFSSHITRGEHRFHMS

SEQ ID NO: 99824 - protein, 516 aa, Homo sapiens
MATTATCTRFTDDYQLFEELGKGAFSVVRRCVKKTSTQEYAAKIINTKKLSARDHQKLEREARICRLLKHPNIVRLHDSISEEGFHYLVFDLVTGGELFEDIVAREYYSEADASHCIHQILESVNHIHQHDIVHRDLKPENLLLASKCKGAAVKLADFGLAIEVQGEQQAWFGFAGTPGYLSPEVLRKDPYGKPVDIWACGVILYILLVGYPPFWDEDQHKLYQQIKAGAYDFPSPEWDTVTPEAKNLINQMLTINPAKRITADQALKHPWVCQRSTVASMMHRQETVECLRKFNARRKLKGAILTTMLVSRNFSVGRQSSAPASPAASAAGLAGQAAKSLLNKKSDGGVKEPQTTVVHNATDGIKGSTESCNTTTEDEDLKVRKQEIIKITEQLIEAINNGDFEAYTKICDPGLTSFEPEALGNLVEGMDFHKFYFENLLSKNSKPIHTTILNPHVHVIGEDAACIAYIRLTQYIDGQGRPRTSQSEETRVWHRRDGKWLNVHYHCSGAPAAPLQ

SEQ ID NO: 99825 - protein, 84 aa, Homo sapiens
MDQKIVLELDRKVADQQSTLEKAGVAGFYVTTNPQELMLQMNLLELIRKLQQRGCWAGKAALGLGGPWQLPAAQCDQKGSPVPP

SEQ ID NO: 99826 - protein, 72 aa, Homo sapiens
MAQKPLRLLACGDVEGKFDILFNRVQAIQKKSGNFDEISLAPPKMLNGRSIRLASRKLLFRHMCLVLITRKQ

SEQ ID NO: 99827 - protein, 121 aa, Homo sapiens
MAAAYLDPNLNHTPNSSTKTHLGTGMERSPGAMERVLKVFHYFESNSEPTTWASIIRHGDATDVRGIIQKIVDSHKVKHVACYGFRLSHLRSEEVHWLHVDMGVSSVREKYELAHPPEEWK

SEQ ID NO: 99828 - protein, 3058 aa, Homo sapiens
MHLHQVLTGAVNPGDNCYSVGSVGDVPFTAYGSGCDIVILANDFECVQIIPGAKHGNIQVSCVECSNQQGRIAASYGNAVCIFEPLGINSHKRNCQLKCQWLKTGQFFLSSVTYNLAWDPQDNRLLTATDSIQLWAPPGDDILEEEEEIDNTVPPVLNDWKCVWQCKTSVSVHLMEWSPDGEYFATAGKDDCLLKVWYPMTGWKSSIIPQDHHEVKRRQSSTQFSFVYLAHPRAVTGFSWRKTSKYMPRGSVCNVLLTSCHDGVCRLWAETLLPEDCLLGEQICETTTSSIASSLSHAGRHKDRIQHALETIHHLKNLRKGQRRSSVLVTHAELMPDQTAMHEVQRHISHHANALCHFHIAASINPATDIPNVLVGTAFNVDDGNGGFVVHWLNNKEFHFTSSTEVFMHQLRKLSDKQVDHENDDADREDEEHSQEDRERGLHMKLDHDLSLDRESEAGTGSSEHEDGEREGSPRTYSRLSVPMPLPTVLLDRKIETLLTEWNKNPDMLFTIHPVDGTFLVWHVKYLDEYNPGIFRQVQVSFSSRIPVAFPSGDASSLSKNIMMYACINATKDSHHTLLHQEGMSVGSPHGSQPHSRSHSTHMNILAPTVMMISKHIDGSLNQWAVTFADKSAFTTVLTVSHKFRYCGHRFHLNDLACHSVLPLLLTSSHHNALLTPELDCQWDSDNKLSRLMDPVKHIKGSSKQPLRNAATRTFHDPNAIYSELILWRVDPIGPLSYTGGVSELARINSLHTSAFSNVAWLPTLIPSYCLGTYCNSASACFVASDGKNLRLYQAVVDARKLLDELSDPESSKLIGEVFNIVSQQSTARPGCIIELDAITNQCGSNTQLLHVFQEDFIIGYKPHKEDMEKKETEIFFQPSQGYRPPPFSEKFFLVVIEKDSNNNSILHMWHLHLKSVQACLAKASEGASSESLLSVPGQKNVDSSPETSPSVSPMPHSSSIANLQTASKLILSSRLVYSQPLDLPESVEVIRATPSAGHLSSSSIYPVCLAPYLVVTTCSDNKVRFWKCCMEANPECNKSDEKEIYHWKRWPLMNDEGEDNSSTVSIVGRPVAVSCSYTGRLAVAYKQPIHHNGFVSKEFSMHVCIFECESTGGSEWVLEQTIHLDDLVKVGSVLDSRVSVDSNLFVYSKSDALLSKDRYLIPNIKHLVHLDWVSKEDGSHILTVGVGANIFMYGRLSGIVTEQTNSKDGVAVITLPLGGSIKQGVKSRWVLLRSIDLVSSVDGTPSLPVSLSWVRDGILVVGMDCEMHVYAQWKHAVKFGDTEADSSNAEEAAMQDHSTFKSNMLARKSVVEGTAISDDVFCSPTVIQDGGLFEAAHVLSPTLPQYHPTQLLELMDLGKVRRAKAILSHLVKCIAGEVAIVRDPDAGEGTKRHLSRTISVSGSTAKETVTVGKDGTRDYTEIDSIPPLPLYALLAADQDTSYRISEESTKIPQSYEDQTVSQPEDQYSELFQIQDIPTDDIDLEPEKRENKSKVINLSQYGPAYFGQEHARVLSSHLMHSSLPGLTRLEQMFLVALADTVATTSTELDESRDKSCSGRDTLDECGLRYLLAMRLHTCLLTSLPPLYRVQLLHQGVSTCHFAWAFHSEAEEELINMIPAIQRGDPQWSELRAMGIGWWVRNINTLRRCIEKVAKASFQRNNDALDAALFYLSMKKKAVVWGLFRSQHDEKMTTFFSHNFNEDRWRKAALKNAFSLLGKQRFEQSAAFFLLAGSLKDAIEVCLEKMEDIQLAMVIARLYESEFETSSTYISILNQKILGCQKDGSGFSCKRLHPDPFLRSLAYWVMKDYTRALDTLLEQTPKEDDEHQVIIKSCNPVAFSFYNYLRTHPLLIRRNLASPEGTLATLGLKTEKNFVDKINLIERKLFFTTANAHFKVGCPVLALEVLSKIPKVTKTSALSAKKDQPDFISHRMDDVPSHSKALSDGNGSSGIEWSNVTSSQYDWSQPIVKVDEEPLNLDWGEDHDSALDEEEDDAVGLVMKSTDAREKDKQSDQKASDPNMLLTPQEEDDPEGDTEVDVIAEQLKFRACLKILMTELRTLATGYEVDGGKLRFQLYNWLEKEIAALHEICNHESVIKEYSSKTYSKVESDLLDQEEMVDKPDIGSYERHQIERRRLQAKREHAERRKSWLQKNQDLLRVFLSYCSLHGAQGGGLASVRMELKFLLQESQQETTVKQLQSPLPLPTTLPLLSASIASTKTVIANPVLYLNNHIHDILYTIVQMKTPPHPSIEDVKVHTLHSLAASLSASIYQALCDSHSYSSQTEGNQFTGMAYQGLLLSDRRRLRTESIEEHATPNSSPAQWPGVSSLINLLSSAQDEDQPKLNILLCEAVVAVYLSLLIHALATNSSSELFRLAAHPLNNRMWAAVFGGGVKLVVKPRRQSENISAPPVLSEDIDKHRRRFNMRMLVPGRPVKDATPPPVPAERPSYKEKFIPPELSMWDYFVAKPFLPLSDSGVIYDSDESIHSDEEDDAFFSDTQIQEHQDPNSYSWALLHLTMVKLALHNVKNFFPIAGLEFSELPVTSPLGIAVIKNLENWEQILQEKMDQFEGPPPNYINTYPTDLSVGAGPAILRNKAMLEPENTPFKSRDSSAFPVKRLWHFLVKQEVLQETFIRYIFTKKRKQSESIEEHVEQVNQNCIAEDCHIKVEADLGYPGGKAKVIHKESDMIMAFSVNKANCNEIVLASTHDVQELDVTSLLACQSYIWIGEEYDRESKSSDDVDYRGSTTTLYQPSATSYSASQVHPPSSLPWLGTGQTSTGASVLMKRNLHNVKRMTSHPVHQYYLTGAQDGSVRMFEWTRPQQLVCFRQAGNARVTRLYFNSQGNKCGVADGEGFLSIWQVNQTASNPKPYMSWQCHSKATSDFAFITSSSLVATSGHSNDNRNVCLWDTLISPGNSLIHGFTCHDHGATVLQYAPKQQLLISGGRKGHVCIFDIRQRQLIHTFQAHDSAIKALALDPYEEYFTTGSAEGNIKVWRLTGHGLIHSFKSEHAKQSIFRNIGAGVMQIDIIQGNRLFSCGADGTLKTRVLPNAFNIPNRILDIL

SEQ ID NO: 99829 - protein, 69 aa, Homo sapiens
  MOD_RES (1)..(1): Any amino acid
XFAPVICKRTCLKGQCRDSCQQGSNMTLIGENGHSTDTLTGSGFRVGPAPRGECARPSPARGLSPGAPH

SEQ ID NO: 99830 - protein, 1603 aa, Homo sapiens
MPLAFCGSENHSAAYRVDQGVLNNGCFVDALNVVPHVFLLFITFPILFIGWGSQSSKVHIHHSTWLHFPGHNLRWILTFMLLFVLVCEIAEGILSDGVTESHHLHLYMPAGMAFMAAVTSVVYYHNIETSNFPKLLIALLVYWTLAFITKTIKFVKFLDHAIGFSQLRFCLTGLLVILYGMLLLVEVNVIRVRRYIFFKTPREVKPPEDLQDLGVRFLQPFVNLLSKGTYWWMNAFIKTAHKKPIDLRAIGKLPIAMRALTNYQRLCEAFDAQVRKDIQGTQGARAIWQALSHAFGRRLVLSSTFRILADLLGFAGPLCIFGIVDHLGKENDVFQPKTQFLGVYFVSSQEFLANAYVLAVLLFLALLLQRTFLQASYYVAIETGINLRGAIQTKIYNKIMHLSTSNLSMGEMTAGQICNLVAIDTNQLMWFFFLCPNLWAMPVQIIVGVILLYYILGVSALIGAAVIILLAPVQYFVATKLSQAQRSTLEYSNERLKQTNEMLRGIKLLKLYAWENIFRTRVETTRRKEMTSLRAFAIYTSISIFMNTAIPIAAVLITFVGHVSFFKEADFSPSVAFASLSLFHILVTPLFLLSSVVRSTVKALVSVQKLSEFLSSAEIREEQCAPHEPTPQGPASKYQAVEEGLPSLHSSQPSGSSPPNHPQPLRVVNRKRPAREDCRGLTGPLQSLVPSADGDADNCCVQIMGGYFTWTPDGIPTLSNITIRIPRGQLTMIVGQVGCGKSSLLLAALGEMQKVSGAVFWSSLPDSEIGEDPSPERETATDLDIRKRGPVAYASQKPWLLNATVEENIIFESPFNKQRYKMVIEACSLQPDIDILPHGDQTQIGERGINLSGGQRQRISVARALYQHANVVFLDDPFSALDIHLSDHLMQAGILELLRDDKRTVVLVTHKLQYLPHADWIIAMKDGTIQREGTLKDFQRSECQLFEHWKTLMNRQDQELEKETVTERKATEPPQGLSRAMSSRDGLLQDEEEEEEEAAESEEDDNLSSMLHQRAEIPWRACAKYLSSAGILLLSLLVFSQLLKHMVLVAIDYWLAKWTDSALTLTPAARNCSLSQECTLDQTVYAMVFTVLCSLGIVLCLVTSVTVEWTGLKVAKRLHRSLLNRIILAPMRFFETTPLGSILNRFSSDCNTIDQHIPSTLECLSRSTLLCVSALAVISYVTPVFLVALLPLAIVCYFIQKYFRVASRDLQQLDDTTQLPLLSHFAETVEGLTTIRAFRYEARFQQKLLEYTDSNNIASLFLTAANRWLEVRMEYIGACVVLIAAVTSISNSLHRELSAGLVGLGLTYALMVSNYLNWMVRNLADMELQLGAVKRIHGLLKTEAESYEGLLAPSLIPKNWPDQGKIQIQNLSVRYDSSLKPVLKHVNALIAPGQKIGICGRTGSGKSSFSLAFFRMVDTFEGHIIIDGIDIAKLPLHTLRSRLSIILQDPVLFSGTIRFNLDPERKCSDSTLWEALEIAQLKLVVKALPGGLDAIITEGGENFSQGQRQLFCLARAFVRKTSIFIMDEATASIDMATENILQKVVMTAFADRTVVTIAHRVHTILSADLVIVLKRGAILEFDKPEKLLSRKDSVFASFVRADK

SEQ ID NO: 99831 - protein, 227 aa, Homo sapiens
MTVPATAIYFTAYDQLKAFLCGRALTSDLYAPMVAGALARLGTVTVISPLELMRTKLQAQHVSYRELGACVRTAVAQGGWRSLWLGWGPTALRDVPFSALYWFNYELVKSWLNGFRPKDQTSVGMSFVAGGISGTVAAVLTLPFDVVKTQRQVALGAMEAVRVNPLHVDSTWLLLRRIRAESGTKGLFAGFLPRIIKAAPSCAIMISTYEFGKSFFQRLNQDRLLGG

SEQ ID NO: 99832 - protein, 119 aa, Homo sapiens
MASREDELRNCVVCGDQATGYHFNALTCEGCKGFFRRTVSKSIGPTCPFAGSCEVSKTQRRHCPACRLQKCLDAGMRKDTSSSSVHPSPALAHPGPCAASGHTLRRHQHFHGTASHQVY

SEQ ID NO: 99833 - protein, 998 aa, Homo sapiens
EDDRLAAMFREFTQQNKATLVDHGIRRLTFLVAQKDFRKQVNYEVDRRFHREFPKFFTFRARDKFEEDRIYRHLEPALAFQLELNRMRNFDLTAIPCANHKMHLYLGAAKVEVGTEVTDYRFFVRAIIRHSDLVTKEASFEYLQNEGERLLLEAMDELEVAFNNTNVRTDCNHIFLNFVPTVIMDPSKIEESVRSMVMRYGSRLWKLRVLQAELKINIRLTPTGKAIPIRLFLTNESGYYLDISLYKEVTDSRTAQIMFQAYGDKQGPLHGMLINTPYVTKDLLQSKRFQAQSLGTTYIYDIPEMFRQIGMVAWKMTFKSPEYPEGRDIIVIGNDITYRIGSFGPQEDLLFLRASELARAEGIPRIYVSANSGARIGLAEEIRHMFHVAWVDPEDPYKGYRYLYLTPQDYKRVSALNSVHCEHVEDEGESRYKITDIIGKEEGIGPENLRGSGMIAGESSLAYNEIITISLVTCRAIGIGAYLVRLGQRTIQVENSHLILTGAGALNKVLGREVYTSNNQLGGIQIMHNNGVTHCTVCDDFEGVFTVLHWLSYMPKSVHSSVPLLNSKDPIDRIIEFVPTKTPYDPRWMLAGRPHPTQKGQWLSGFFDYGSFSEIMQPWAQTVVVGRARLGGIPVGVVAVETRTVELSIPADPANLDSEAKIIQQAGQVWFPDSAFKTYQAIKDFNREGLPLMVFANWRGFSGGMKDMYDQVLKFGAYIVDGLRECCQPVLVYIPPQAELRGGSWVVIDSSINPRHMEMYADRESRGSVLEPEGTVEIKFRRKDLVKTMRRVDPVYIHLAERLGTPELSTAERKELENKLKEREEFLIPIYHQVAVQFADLHDTPGRMQEKGVISDILDWKTSRTFFYWRLRRLLLEDLVKKKIHNANPELTDGQIQAMLRRWFVEVEGTVKAYVWDNNKDLAEWLEKQLTEEDGVHSVIEENIKCISRDYVLKQIRSLVQANPEVAMDSIIHMTQHISPTQRAEVIRILSTMDSPST

SEQ ID NO: 99834 - protein, 77 aa, Homo sapiens
MATSADSPSSPLGAEDLLSDSSEPPGLNQVSSEVTSQLYASLRLSRQAEATARAQLYLPSTSPPHEGLDGFAQELSR

SEQ ID NO: 99835 - protein, 221 aa, Homo sapiens
MALLVRVLRNQTSISQWVPVCSRLIPVSPTQGQGDRALSRTSQWPQMSQSRACGGSEQIPGIDIQLNRKYHTTRKLSTTKDSPQPVEEKVGAFTKIIEAMGFTGPLKYSKWKIKIAALRMYTSCVEKTDFEEFFLRCQMPDTFNSWFLITLLHVWMCLVRMKQEGRSGKYMCRIIVHFMWEDVQQRGRVMGVSECCQMLVLDNSREGFEFGVLSVVKWPCF

SEQ ID NO: 99836 - protein, 349 aa, Homo sapiens
MAAAQPKYPAGATARRLARGCWSALWDYETPKVIVVRNRRLGVLYRAVQLLILLYFVWYVFIVQKSYQESETGPESSIITKVKGITTSEHKVWDVEEYVKPPEGGSVFSIITRVEATHSQTQGTCPESIRVHNATCLSDADCVAGELDMLGNGLRTGRCVPYYQGPSKTCEVFGWCPVEDGASVSQFLGTMAPNFTILIKNSIHYPKFHFSKGNIADRTDGYLKRCTFHEASDLYCPIFKLGFIVEKAGESFTELAHKGGVIGVIINWDCDLDLPASECNPKYSFRRLDPKHVPASSGYNFRFAKYYKINGTTTRTLIKAYGIRIDVIVHGQVPAPAGGREVQPDSHHY

SEQ ID NO: 99837 - protein, 151 aa, Homo sapiens
MAGFLDNFRWPECECIDWSERRNAVASVVAGILFFTGWWIMIDAAVVYPKPEQLNHAFHTCGVFSTLAFFMINAVSNAQVRGDSYESGCLGRTGARVWLFIGFMLMFGSLIASMWILFGAYVTQMLAIGGKGASYCFLSSFDVARTSNYFD

SEQ ID NO: 99838 - protein, 133 aa, Homo sapiens
MGSVTVRYFCYGCLFTSATWTVLLFVYFNFSEVTQPLKNVPVKGSGPHGPSPKKFYPRFTRGPSRVLEPQFKANKIDDVIDSRVEDPEEGHLKFSSELDVKKSSTHLTCQLLVLLSVSIMKRFLPCFGQCTVS

SEQ ID NO: 99839 - protein, 70 aa, Homo sapiens
MNQELLSVGSKRRRTGGSLRGNPSSSQVDEEQMNRVVEEEQQQQLRQQEEEHTARNGEVVGVEPRPGGQN

SEQ ID NO: 99840 - protein, 36 aa, Homo sapiens
MNGQEVFYLTYTPEDVEGNVQLETGDKINFVIDNNK

SEQ ID NO: 99841 - protein, 236 aa, Homo sapiens
MEEEVRLKKRKRRRNVDKDPAKEDVEKAKKRRGRPPAEKLSPNPPKLTKQMNAIIDTVINYKDSSGRQLSEVFIQLPSRKELPEYYELIRKPVDFKKIKERIRNHKYRSLGDLEKDVMLLCHNAQTFNLEGSQIYEDSIVLQSVFKSARQKIAKEEESEDESNEEEEEEDEEESESEAKSVKVKIKLNKKDDKGRDKGKGKKRPNRGKAKPVVSDFDSDEEQDEREQSEGSGTDDE

SEQ ID NO: 99842 - protein, 81 aa, Homo sapiens
MVEADHPGKLFIGGLNRETNEKMLKAVFGKHGPISEVLLIKDRTSKSRGFAFITFENPADAKNAAKDMNGKMMVDTLLISR

SEQ ID NO: 99843 - protein, 1344 aa, Homo sapiens
MLDPSSSEEESDEIVEEESGKEVLGSAPSGARLSPSRTSEGSAGSAGLGGGGAGAGAGVGAGGGGGSGASSGGGAGGLQPSSRAGGGRPSSPSPSVVSEKEKEELERLQKEEEERKKRLQLYVFVMRCIAYPFNAKQPTDMARRQQKISKQQLQTVKDRFQAFLNGETQIMADEAFMNAVQSYYEVFLKSDRVARMVQSGGCSANDSREVFKKHIEKRVRSLPEIDGLSKETVLSSWMAKFDAIYRGEEDPRKQQARMTASAASELILSKEQLYEMFQNILGIKKFEHQLLYNACQLDNPDEQAAQIRRELDGRLQMADQIARERKFPKFVSKEMENMYIEELKSSVNLLMANLESMPVSKGGEFKLQKLKRSHNASIIDMGEESENQLSKSDVVLSFSLEVVIMEVQGLKSLAPNRIVYCTMEVEGGEKLQTDQAEASKPTWGTQGDFSTTHALPAVKVKLFTESTGVLALEDKELGRVILHPTPNSPKQSEWHKMTVSKNCPDQDLKIKLAVRMDKPQNMKHSGYLWAIGKNVWKRWKKRFFVLVQVSQYTFAMCSYREKKAEPQELLQLDGYTVDYTDPQPGLEGGRAFFNAVKEGDTVIFASDDEQDRILWVQAMYRATGQSHKPVPPTQVQKLNAKGGNVPQLDAPISQFYADRAQKHGMDEFISSNPCNFDHASLFEMVQRLTLDHRLNDSYSCLGWFSPGQVFVLDEYCARNGVRGCHRHLCYLRDLLERAENGAMIDPTLLHYSFAFCASHVHGNSQQMHVYLSGLPPNTDPEGSKTPSPPEPEAKKDTKKESKKRKDSKTQANQELKRPDGIGTVTVEEKERFEEIKERLRVLLENQITHFRYCFPFGRPEGALKATLSLLERVLMKDIVTPVPQEEVKTVIRKCLEQAALVNYSRLSEYAKIEENVGRLITPAKKLEDTIRLAELVIEVLQQNEEHHAEAFAWWSDLMVEHAETFLSLFAVDMDAALEVQPPDTWDSFPLFQLLNDFLRTDYNLCNGKFHKHLQDLFAPLVVRYVDLMESSIAQSIHRGFERESWEPVNNGSGTSEDLFWKLDALQTFIRDLHWPEEEFGKHLEQRLKLMASDMIESCVKRTRIAFEVKLQKTSRSTDFRVPQSICTMFNVMVDAKAQSTKLCSMEMGQEHQYHSKIDELIEETVKEMITLLVAKFVTILEGVLAKLSRYDEGTLFSSFLSFTVKAASKYVDVPKPGMDVADAYVTFVRHSQDVLRDKVNEEMYIERLFDQWYNSSMNVICTWLTDRMDLQLHIYQLKTLIRMVKKTYRDFRLQGVLDSTLNSKTYETIRNRLTVEEATASVSEGGGLQGISMKDSDEEDEEDD

SEQ ID NO: 99844 - protein, 99 aa, Homo sapiens
MAEDKTKPSELDQGKYDADDNVKIICLGDSAVGKSKLMERFLMDGFQPQQLSTYALTLYKHTATVDGRTILVDFWDTAGQERFQSMHASYYHKAHACIM

SEQ ID NO: 99845 - protein, 576 aa, Homo sapiens
MPLGRLAGSARSEEGSEAFLEGMVDWELSRLQRQCKVMEGERRAYSKEVHQRINKQLEEIRRLEEVRGDLQVQISAAQNQVKRLRDSQRLENMDRLLKGRAQVQAEIEELQEQTRALDKQIQEWETRIFTHSKNVRSPGFILDQKVKIRRRIRILENQLDRVTCHFDNQLVRNAALREELDLLRIDRNRYLNVDRKLKKEIHHLHHLVSTLILSSTSAYAVREEAKAKMGLLRERAEKEEAQSEMEAQVLQRQILHLEQLHHFLKLKNNDRQPDPDVLEKREKQAGEVAEGVWKTSQERLVLCYEDALNKLSQLMGESDPDLLVQKYLEIEERNFAEFNFINEQNLELEHVQEEIKEMQEALVSARASKDDQHLLQEQQQKVLQQRMDKVHSEAERLEARFQDVRGQLEKLKADIQLLFTKAHCDSSMIDDLLGVKTSMGDRDMGLFLSLIEKRLVELLTVQAFLHAQSFTSLADAALLVLGQSLEDLPKKMAPLQPPDTLEDPPGFEASDDYPMSREELLSQVEKLVRVGPAGVGPGLSVCRGPVHLPCRWSSRSRRRRSARRTWPPPPRSWTAP

SEQ ID NO: 99846 - protein, 119 aa, Homo sapiens
MSAARPQFSIDDAFELSLEDGGPGPESSGVARFGPLHFERRARFEVADEDKQSRLRYQNLENDEDGAQASPEPDGGVGTRLGPGIPAELPSAAPSGPSAPSAAAPSAPTTPAAAGPNTL

SEQ ID NO: 99847 - protein, 271 aa, Homo sapiens
MGITLHLLLHSDRDPIPDVPAVYFVMPTEENIDRMCQDLRNQLYESYYLNFISAISRSKLEDIANAALAASAVTQVAKVFDQYLNFITLEDDMFVLCNQNKELVSYRAINRPDITDTEMETVMDTIVDSLFCFFVTLGAVPIIRCSRGTAAEMVAVKLDKKLRENLRDARNSLFTGDTLGAGQFSFQRPLLVLVDRNIDLATPLHHTWTYQALVHDVLDFHLNRVNLEESSGVENSPAGARPKRKNKKSYDLTPVDKFWQKHKGSSCAILF

SEQ ID NO: 99848 - protein, 225 aa, Homo sapiens
  MOD_RES (1)..(1): Any amino acid
XPLADEYDPMFPNDYEKVVKRQREERQRQRELERQKEIEEREKRRKDRHEASGFARRPDPDSDEDEDYERERRKRSMGGAAIAPPTSLVEKDKELPRDFPYEEDSRPRSQSSKAAIPPPVYEEQDRPRSPTGPSNSFLANMGGTVAHKIMQKYGFREGQGLGKHEQGLSTALSVEKTSKRGGKIIVGDATEKGVSPGKRVTRGKGLAPSISDMASLDPHVSAGGQ

SEQ ID NO: 99849 - protein, 62 aa, Homo sapiens
MASATAPAAAVPTLASPLEQLRHLAEELRLLLPRVRVGEAQETTEEFNREMFWRRLRNPEVL

SEQ ID NO: 99850 - protein, 539 aa, Homo sapiens
MKRGTSLHSRRGKPEAPKGSPQINRKSGQEMTAVMQSGRPRSSSTTDAPTSSAMMEIACAAAAAAAACLPGEEGTAERIERLEVSSLAQTSSAVASSTDGSIHTDSVDGTPDPQRTKAAIAHLQQKILKLTEQIKIAQTARDDNVAEYLKLANSADKQQAARIKQVFEKKNQKSAQTILQLQKKLEHYHRKLREVEQNGIPRQPKDVFRDMHQGLKDVGAKVTGFSEGVVDSVKGGFSSFSQATHSAAGAVVSKPREIASLIRNKFGSADNIPNLKDSLEEGQVDDAGKALGVISNFQSSPKYGSEEDCSSATSGSVGANSTTGGIAVGASSSKTNTLDMQSSGFDALLHEIQEIRETQARLEESFETLKEHYQRDYSLIMQTLQEERYRCERLEEQLNDLTELHQNEILNLKQELASMEEKIAYQSYERARDIQEALEACQTRISKMELQQQQQQVVQLEGLENATARNLLGKLINILLAVMAVLLVFVSTVANCVVPLMKTRNRTFSTLFLVVFIAFLWKHWDALFSYVERFFSSPR

SEQ ID NO: 99851 - protein, 63 aa, Homo sapiens
MTRHGKNCTAGAVYTYHEKKKDTAASGYGTQNIRLSRDAVKDFDCCCLSLQPCHDPVVTWLPV

SEQ ID NO: 99852 - protein, 131 aa, Homo sapiens
  MOD_RES (1)..(1): Any amino acid
XRKATTRPPPKPTLPPPTPSAHTESKLLNEMAIKERVEGRAKVPYKFRDSLKRFSFSPTGMLKILRLSLILGALACFIITQANESFITITSLEICIVVFFILIYVLTLHHLLTYLHWPLLNAEYRKQTKQI

SEQ ID NO: 99853 - protein, 157 aa, Homo sapiens
MPGRSSSNSGSTGFISFSGVESALSSLKNFQACINSGMDTASSVALDLVESQTEVSSEYSMDKAMVEFATLDRQLNHYVKAVQSTINHVKEERPEKIPDLKLLVEKKFLALQSKNSDADFQNNEKFVQFKQQLKELKKQCKSTCFALVRLFEIRELT

SEQ ID NO: 99854 - protein, 265 aa, Homo sapiens
MERGKVKKKEKEKETQEEKIGEKGREEKVKRKEVEQKIKQKQEKQERRKGKEKEEKRTKQGKETNKEKEQFKGQEEKGENKDSTLTRTPLEPLEKNKQILVLGLDGAGKTSVLHSLASNRVQHSVAPTQGFHAVCINTEDSQMEFLEIGGSKPFRSYWEMYLSKGLLLIFVVDSADHSRLPEAKKYLHQLIAANPVLPLVVFANKQDLEAAYHITDIHEALALSEVGNDRKMFLFGTYLTKNGSEIPSTMQDAKDLIAQLAADVQ

SEQ ID NO: 99855 - protein, 51 aa, Homo sapiens
MSRSVALAVLALLSLSGLEAIQHSGLLTSSSREWKVKFPELLCVWVSSIRH

SEQ ID NO: 99856 - protein, 114 aa, Homo sapiens
MGSAFERVVRRVVQELDHGGEFIPVTSLQSSTGFQPYCLVVRKPSSSWFWKPRYKCVNLSIKDILEPDAAEPDVQRGRSFHFYDAMDGQIQGSVELAAPGQAKIAGGAAVSDSS

SEQ ID NO: 99857 - protein, 203 aa, Homo sapiens
MSENAAPGLISELKLAVPWGHIAAKAWGSLQGPPVLCLHGWLDNASSFDRLIPLLPQDFYYVAMDFGGHGLSSHYSPGVPYYLQTFVSEIRRVVAALKWNRFSILGHSFGGVVGGMFFCTFPEMVDKLILLDTPLFLLESDEMENLLTYKRRAIEHVLQVEASQEPSHVFSLKQLLQRQRTALTSSAGSCVRIPSGSCRPMSC

SEQ ID NO: 99858 - protein, 8 aa, Homo sapiens
MSRKQNQK

SEQ ID NO: 99859 - protein, 847 aa, Homo sapiens
MTRFRIDELEPRRPRYRVPDVLVADPPIARLSVSGRDENSVELTMAEGPYKIILTARPFRLDLLEDRSLLLSVNARGLLEFEHQRAPRVSQGSKDPAEGDGAQPEETPRDGDKPEETQGKAEKDEPGAWEETFKTHSDSKPYGPMSVGLDFSLPGMEHVYGIPEHADNLRLKVTEGGEPYRLYNLDVFQYELYNPMALYGSVPVLLAHNPHRDLGIFWLNAAETWVDISSNTAGKTLFGKMMDYLQGSGETPQTDVRWMSETGIIDVFLLLGPSISDVFRQYASLTGTQALPPLFSLGYHQSRWNYRDEADVLEVDQGFDDHNLPCDVIWLDIEHADGKRYFTWDPSRFPQPRTMLERLASKRRKLVAIVDPHIKVDSGYRVHEELRNLGLYVKTRDGSDYEGWCWPGSAGYPDFTNPTMRAWWANMFSYDNYEGSAPNLFVWNDMNEPSVFNGPEVTMLKDAQHYGGWEHRDVHNIYGLYVHMATADGLRQRSGGMERPFVLARAFFAGSQRFGAVWTGDNTAEWDHLKISIPMCLSLGLVGLSFCGADVGGFFKNPEPELLVRWYQMGAYQPFFRAHAHLDTGRREPWLLPSQHNDIIRDALGQRYSLLPFWYTLLYQAHREGIPVMRPLWVQYPQDVTTFNIDDQYLLGDALLVHPVSDSGAHGVQVYLPGQGEVWYDIQSYQKHHGPQTLYLPVTLSSIPVFQRGGTIVPRWMRVRRSSECMKDDPITLFVALSPQGTAQGELFLDDGHTFNYQTRQEFLLRRFSFSGNTLVSSSADPEGHFETPIWIERVVIIGAGKPAAVVLQTKGSPESRLSFQHDPETSVLVLRKPGINVASDWSIHLR

SEQ ID NO: 99860 - protein, 246 aa, Homo sapiens
MEIRWFRSQTFNVVHLYQEQQELPGRQMPAFRNRTKLVKDDIAYGSVVLQLHSIIPSDKGTYGCRFHSDNFSGEALWELEVAGLGSDPHLSLEGFKEGGIQLRLRSSGWYPKPKVQWRDHQGQCLPPEFEAIVWDAQDLFSLETSVVVRAGALSNVSVSIQNLLLSQKKELVVQIADVFVPGASAWKSAFVATLPLLLVLAALALGVLRKQRRSREKLRKQAEKRQGERGQGVLHAPAQVPKPAVI

SEQ ID NO: 99861 - protein, 37 aa, Homo sapiens
MQSLVLLPRLECSDVILAYCNLHLPGKLHEPKWQRLQ

SEQ ID NO: 99862 - protein, 99 aa, Homo sapiens
MATNFLAHEKIWFDKFKYDDAERRFYEQMNGPVCALSSWTGWSGGLPSWCPWATVSGSYRFSVWWRTTRWGQTCWRRRSPSLRSTCRVSISQLSTRSEA

SEQ ID NO: 99863 - protein, 380 aa, Homo sapiens
MVLESTMVCVDNSEYMRNGDFLPTRLQAQQDAVNIVCHSKTRSNPENNVGLITLANDCEVLTTLTPDTGRILSKLHTVQPKGKITFCTGIRVAHLALKHRQGKNHKMRIIAFVGSPVEDNEKDLVKLAKRLKKEKVNVDIINFGEEEVNTEKLTAFVNTLNGKDGTGSHLVTVPPGPSLADALISSPILAGEGGAMLGLGASDFEFGVDPSADPELALALRVSMEEQRQRQEEEARRAAAASAAEAGIATTGTEGERDSDDALLKMTISQQEFGRTGLPDLSSMTEEEQIAYAMQMSLQGAEFGQAESADIDASSAMDTSEPAKEEDDYDVMQDPEFLQSVLENLPGVDPNNEAIRNAMGSLASQATKDGKKDKKEEDKK

SEQ ID NO: 99864 - protein, 82 aa, Homo sapiens
MTSSPRAPPGEQGRGGAEMIRAAPPPLFLLLLLLLLLVSWASRGEAAPDQDEIQRLPGLAKQPSFRQYSGYLKGSGSKHLHY

SEQ ID NO: 99865 - protein, 128 aa, Homo sapiens
MAEPDYIEDDNPELIRPQKLINPVKTSRNHQDLHRELLMNQKRGLAPQNKPELQKVMEKRKRDQVIKQKEEEAQKKKSDLEIELLKRQQKLEQLELEKQKLQEEQENAPEFVKVKGNLRRTGQEVAQA

SEQ ID NO: 99866 - protein, 42 aa, Homo sapiens
METGERARLILILVLQLLLRIRRNRQQRCRRVLSHRSLFPRM

SEQ ID NO: 99867 - protein, 253 aa, Homo sapiens
MAAPGSCALWSYCGRGWSRAMRGCQLLGLRSSWPGDLLSARLLSQEKRAAETHFGFETVSEEEKGGKVYQVFESVAKKYDVMNDMMSLGIHRVWKDLLLWKMHPLPGTQLLDVAGGTGLAWVLGDAEELPFDDDKFDIYTIAFGIRNVTHIDQALQEAHRVLKPGGRFLCLEFSQVNNPLISRLYDLYSFQVIPVLGEVIAGDWKSYQYLVESIRRFPSQEEFKDMIEDAGFHKVTYESLTSGIVAIHSGFKL

SEQ ID NO: 99868 - protein, 591 aa, Homo sapiens
MITRRSLGYAYVNFQQPADAERALDTMNFDVIKGKPVRIMWSQRDPSLRKSGVGNIFIKNLDKSIDNKALYDTFSAFGNILSCKVVCDENGSKGYGFVHFETQEAAERAIEKMNGMLLNDRKVFVGRFKSRKEREAELGARAKEFTNVYIKNFGEDMDDERLKDLFGKFGPALSVKVMTDESGKSKGFGFVSFERHEDAQKAVDEMNGKELNGKQIYVGRAQKKVERQTELKRKFEQMKQDRITRYQGVNLYVKNLDDGIDDERLRKEFSPFGTITSAKVMMEGGRSKGFGFVCFSSPEEATKAVTEMNGRIVATKPLYVALAQRKEERQAHLTNQYMQRMASVRAVPNPVINPYQPAPPSGYFMAAIPQTQNRAAYYPPSQIAQLRPSPRWTAQGARPHPFQNMPGAIRPAAPRPPFSTMRPASSQVPRVMSTQRVANTSTQTMGPRPAAAAAAATPAVRTVPQYKYAAGVRNPQQHLNAQPQVTMQQPAVHVQGQEPLTASMLASAPPQEQKQMLGERLFPLIQAMHPTLAGKITGMLLEIDNSELLHMLESPESLRSKVDEAVAVLQAHQAKEAAQKAVNSATGVPTV

SEQ ID NO: 99869 - protein, 272 aa, Homo sapiens
MPFNGEKQCVGEDQPSDSDSSRFSESMASLSDYECSRQSFASDSSSKSSSPASTSPPRVVTFDEVMATARNLSNLTLAHEIAVNENFQLKQEALPEKSLAGRVKHIVHQAFWDVLDSELNADPPEFEHAIKLFEEIREILLSFLTPGGNRLRNQICEVLDTDLIRQQAEHSAVDIQGLANYVISTMGKLCAPVRDNDIRELKATGNIVEVLRQIFHVLDLMQMDMANFTIMSLRPHLQRQLVEYERTKFQEILEETPSEYNIMCIYIEIRLK

SEQ ID NO: 99870 - protein, 106 aa, Homo sapiens
EHSIKATLIWRLFFLIMFLTIIVCGMVAALSAIRANCHQEPSVCLQAACPESWIGFQRKCFYFSDDTKNWTSSQRFCDSQDADLAQVESFQELVSYPGSRRVCLFE

SEQ ID NO: 99871 - protein, 160 aa, Homo sapiens
MACLSPSQLQKFQQDGFLVLEGFLSAEECVAMQQRIGEIVAEMDVPLHCRTEFSTQEEEQLRAQGSTDYFLSSGDKIRFFFEKGVFDEKGNFLVPPEKSINKIGHALHAHDPVFKSITHSFKVQTLARSLGLQMPVVVQSMYIFKQPHFGGEGELRAVGP

SEQ ID NO: 99872 - protein, 158 aa, Homo sapiens
MRALCIRETCSSELGFSRNWSRRKAGHCPNPGISLGAVRTGFRFGHGDKVRYRCSSNLVLTGSSERECQGNGVWSGTEPICRQPYSYDFPEDVAPALGTSFSHMLGATNPTQKTKESLGRKIQIQRSGHLNLYLLLDCSQSVSENDFLIFKESASLMV

SEQ ID NO: 99873 - protein, 33 aa, Homo sapiens
MDNVQPKIKHRPFCFSVKGHVKMLRLHCLVVFM

SEQ ID NO: 99874 - protein, 383 aa, Homo sapiens
MDSNYQQSSAGQPINAKPSQTANAKPIPRTPDHEIQGSKEALIQDLERKLKCKDTLLHNGNQRLTYEEKMARRLLGPQNAAAVFQAQDDSGAQDSQQHNSEHARLQVPTSQVRSRSTSRGDVNDQDAIQEKFYPPRFIQVPENMSIDEGRFCRMDFKVSGLPAPDVSWYLNGRTVQSDDLHKMIVSEKGLHSLIFEVVRASDAGAYACVAKNRAGEATFTVQLDVLAKEHKRAPMFIYKPQSKKVLEGDSVKLECQISAIPPPKLFWKRNNEMVQFNTDRISLYQDNTGRVTLLIKDVNKKDAGWYTVSAVNEAGVTTCNTRLDVTARPNQTLPAPKQLRVRPTFSKYLALNGKGLNVKQAFNPEGEFQRLAAQSGLYESEEL

SEQ ID NO: 99875 - protein, 171 aa, Homo sapiens
MAKQYIEKSLLVPDHVITRLMMSELENRRGQHWLLDGFPRTLGQAEALDKICEVDLVISLNIPFETLKDRLSRRWIHPPSGRVYNLDFNPPHVHGIDDVTGEPLVQQEDDKPEAVAARLRQYKDVAKPVIELYKSRGVLHQFSGTETNKIWPYVYTLFSNKITPIQSKEAY

SEQ ID NO: 99876 - protein, 299 aa, Homo sapiens
MAMATKGGTVKAASGFNAMEDAQTLRKAMKGLGTDEDAIISVLAYRNTAQRQEIRTAYKSTIGRDLIDDLKSELSGNFEQGAGTDEGCLIEILASRTPEEIRRISQTYQQQYGRSLEDDIRSDTSFMFQRVLVSLSAGGRDEGNYLDDALVRQDAQDLYEAGEKKWGTDEVKFLTVLCSRNRNHLLHVFDEYKRISQKDIEQSIKSETSGSFEDALLAIVKCMRNKSAYFAEKLYKSMKGLGTDDNTLIRVMVSRAEIDMLDIRAHFKRLYGKSLYSFIKGDTSGDYRKVLLVLCGGDD

SEQ ID NO: 99877 - protein, 379 aa, Homo sapiens
MALRSAQGDGPTSGHWDGGAEKADFNAKRKKKVAEIHQALNSDPTDVAALRRMAISEGGLLTDEIRRKVWPKLLNVNANDPPPISGKNLRQMSKDYQQVLLDVRRSLRRFPPGMPEEQREGLQEELIDIILLILERNPQLHYYQGYHDIVVTFLLVVGERLATSLVEKLSTHHLRDFMDPTMDNTKHILNYLMPIIDQVNPELHDFMQRHVVRLYDFFLACHPLMPIYFAAVIVLYREQEVLDCDCDMASVHHLLSQIPQDLPYETLISRAGDLFVQFPPSELAREAAAQQQAERTAASTFKDFELASAQQRPDMVLRQRFRGLLRPEDRTKDVLTKPRTNRFVKLAVMGLTVALGAAALAVVKSALEWAPKFQLQLFP

SEQ ID NO: 99878 - protein, 353 aa, Homo sapiens
MLLLSPRSALVSVYCPQIFLLLSSGSYLALSSVVALGANIICNKIPGLAPRQRAICQSRPDAIIVIGEGAQMGINECQYQFRFGRWNCSALGEKTVFGQELRVGSREAAFTYAITAAGVAHAVTAACSQGNLSNCGCDREKQGYYNQAEGWKWGGCSADVRYGIDFSRRFVDAREIKKNARRLMNLHNNEAGRKVLEDRMQLECKCHGVSGSCTTKTCWTTLPKFREVGHLLKEKYNAAVQVEVVRASRLRQPTFLRIKQLRSYQKPMETDLVYIEKSPNYCEEDAATGSVGTQGRLCNRTSPGADGCDTMCCGRGYNTHQYTKVWQCNCKFHWCCFVKCNTCSERTEVFTCK

SEQ ID NO: 99879 - protein, 125 aa, Homo sapiens
MGTSSIFLCVLFLCGALGLTMSPARGRLRCYICGFTKPCHPVPTECRDDEACGISIGTSGKSCLSRAQCPLPGYATYWLHSYTLWHHCCEQDLCNIAASPQQLTSLLASLPLFVASFAGRGHLLH

SEQ ID NO: 99880 - protein, 167 aa, Homo sapiens
MFHSPRRLCSALLQRDAPGLRRLPAPGLRRPLSPPAAVPRPASPRLLAAASAASGAARSCSRTVCSMGTGTSRLYSALAKTLNSSAASQHPEYLVSPDPEHLEPIDPKELLEECRAVLHTRPPRFQRDFVDLRTDCPSTHPPIRVMQWNILAQGMLDAFVPLQSSLL

SEQ ID NO: 99881 - protein, 694 aa, Homo sapiens [sequence omitted]

SEQ ID NO: 99882 - protein, 277 aa, Homo sapiens
MLFLFAVIVLQYVCPGTECQLLRLQAFSSPVPDPYRSEDESSARFVPRYNFTRGDLLRKVDFDIKGDDLIVFLHIQKTGGTTFGRHLVRNIQLEQPCECRVGQKKCTCHRPGKRETWLFSRFSTGWSCGLHADWTELTRCVPHIWNWEQSFSISYNRWRIFQILDAASKDKRGSPNTNAGANSPSSTKTRNTSKSGKNFHYITILRDPVSRYLSEWRHVQRGATWKASLHVCDGRPPTSEELPSCYTGDDWSGCPLKEFMDCPYNLANNRQCACSPT

SEQ ID NO: 99883 - protein, 667 aa, Homo sapiens
MVDIIAKVTRRQSRALPAQVDDPPEPVYANIERQPRATSPGAAAAPLPSPVWETHTDAGTGRPYYYNPDTGVTTWESPFEAAEGAASPATSPASVDSHVSLETEWGQYWDEESRRVFFYNPLTGETAWEDEAENEPEEELEMQPGLSPGSPGDPRPPTPETDYPESLTSYPEEDYSPVGSFGEPGPTSPLTTPPGWSCHVSQDKQMLYTNHFTQEQWVRLEDPHGKPYFYNPEDSSVRWELPQVPVPAPRSIHKSSQDGDTPAQASPPEEKTKTLDKAGVLHRTKTADKGKRLRKKHWSASWTVLEGGVLTFFKDSKTSAAGGLRQPSKFSTPEYTVELRGATLSWAPKDKSSRKNVLELRSRDGSEYLIQHDSEAIISTWHKAIAQGIQELSAELPPEESESSRVDFGSSERLGSWQEKEEDARPNAAAPALGPVGLESDLSKVRHKLRKFLQRRPTLQSLREKGYIKDQVFGCALAALCERERSRVPRFVQQCIRAVEARGLDIDGLYRISGNLATIQKLRYKVDHDERLDLDDGRWEDVHVITGALKLFFRELPEPLFPFSHFRQFIAAIKLQDQARRSRCVRDLVRSLPAPNHDTLRMLFQHLCRVIEHGEQNRMSVQSVAIVFGPTLLRPEVEETSMPMTMVFQNQVVELILQQCADIFPPH

SEQ ID NO: 99884 - protein, 105 aa, Homo sapiens
MAVRKKDGGPNVKYYEAADTVTQFDNVRLWLGKNYKKYIQAEPPTNKSLSSLVVQLLQFQEEVFGKHVSNAPLTKLPIKCFLDFKAGGSLCHILAAAYKFKSDQG

SEQ ID NO: 99885 - protein, 65 aa, Homo sapiens
  MOD_RES (1)..(1): Any amino acid
XVDVFLCSYIIDPLNLFWFGIGKATVFLLPALIFAVKLAKYYRRMDSEDVYDDVETIPMKNPSQH

SEQ ID NO: 99886 - protein, 89 aa, Homo sapiens
MVEEENIRVVRCGGSELNFRRAVFSADSKYIFCVSGDFVKVYSTVTEECVHILHGHRNLVTGIQLNPNNHLQVPLHALRISKRAVFLFP

SEQ ID NO: 99887 - protein, 496 aa, Homo sapiens
MASAGSTARRAGSGSWHSERGEGRGARPQPTPSGSMQQANKVSLKATWTDAESKQPSPSKESDQTAIDQTAIGSYYQLFAAAVGNVEWLRFCLNQSLREIPTDDKGFTAIHFAAQWGKLACLQVLVEEYKFPVDLLTNNSQTPLHLVIHRDNTTVALPCIYYLLEKGADLNAQTCNGSTPLHLAARDGLLDCVKVLVQSGANVHAQDAMGYKPIDFCKIWNHRACARFLKDAMWKKDKKDFAREMTKMKMFKSQLTLMEHNYLIEYQKEHKILREAAIRKWLHGKLHPGHSLVSNTKQARATALSKTPEQRESQRSRSFHPSVDARLQCIPQPTEMPKPIYRKPTVKRPTMWNVSNNPARPPTTQISHSQGIRLGVHPDPTPEHDFSSFLEVRPDGHGGARLHTVDGHWVAPVPRLPFEVLLRMLYPRVWPYRMKVPQGFYPISMREVPRKRHLGDNTFWTDTLAMNLRDTFDEAFLAAVRSHQGLPTLPSPQTNP

SEQ ID NO: 99888 - protein, 175 aa, Homo sapiens
MKPVKHLLTTSNKSANVPALTTKKGLHNLPLSPELKEKHNAKLIHDKIEPMVLRSPPTGESILRYALPIPSSKTKNLLPEDEMIGKIIKHLKMVVSTLEETYGHCDQNGEEPFVKHEHEELSLSVGDDMNSFLTYCSQFAAQLEEALKEEQNILESLFKWFQWQVNQMEEKLLIQ

SEQ ID NO: 99889 - protein, 248 aa, Homo sapiens
MVMADQNQVWVGSEDSVIYIINVHSMSCNKQLTAHCSSVTDLIVQDGQEAPSNVYSCSMDGMVLVWNVSTLQVTSRFQLPRGGLTSIRLHGGRLWCCTGNSIMVMKMNGSLHQELKIEENFKDTSTSFLAFQLLPEEEQLWAACAGRSEVYIWSLKDLAQPPQRVPLEDCSEINCMIRVKKQVWVGSRGLGQGTPKGKIYVIDAERKTVEKELVAHMDTVRTLCSAEDRYVLSGSGREEGKVAIWKGE

SEQ ID NO: 99890 - protein, 80 aa, Homo sapiens
MGWIRGRRSRHSWEMSEFHNYNLDLKKSDFSTRWQKQRCPVVKSKCRENASPFFFCCFIAVAMGIRFIIMVTIWSAVFLN

SEQ ID NO: 99891 - protein, 59 aa, Homo sapiens
MGSPLRFDGRVVLVTGAGAGLGRAYALAFAERGALVVAFKIYAITLWRRSFHNADSLFQ

SEQ ID NO: 99892 - protein, 152 aa, Homo sapiens
MQPILLLLAFLLLPRADQLERKAKRTRAVQPLRLPSNKAQVKPGQTCSVAGWGQTAPLGKHSHTLQEVKMTVQEDRKCESDLRHYYDSTIELCVGDPEIKKTSFKGDSGGPLVCNKVAQGIVSYGRNNGMPPRACTKVSSFVHWIKKTMKRY

SEQ ID NO: 99893 - protein, 61 aa, Homo sapiens
MDSVVFEDVDVNFTQEEWALLDPSQKNLYRDVMQETFRNLASEKNGKIRKLKMSTKIPGET

SEQ ID NO: 99894 - protein, 267 aa, Homo sapiens
MLEKMDLKEFDLDALLGIDDLETMPDDLLTTLDDTCDLFAPLVQETNKQPPQTVNPIGHLPESLTKPDQVAPFTFLQPLPLSPGVLSSTPDHSFSLELGSEVDITEGDRKPDYTAYVAMIPQCIKEEDTPSDNDSGICMSPESYLGSPQHSPSTRGSPNRSLPSPGVLCGSARPKPYDPPGEKMVAAKVKGEKLDKKLKKMEQNKTAATRYRQKKRAEQEALTGECKELEKKNEALKERADSLAKEIQYLKDLIEEVRKARGKKRVP

SEQ ID NO: 99895 - protein, 68 aa, Homo sapiens
MALSQGLFTFKDVAIEFSQEEWECLDPAQRALYRDVMLENYRNLLSLDEDNIPPEDGNHPCTSLHFSL

SEQ ID NO: 99896 - protein, 70 aa, Homo sapiens
MSEASRLCSGYYSLNQSFVEPFQCPRRGEGAALQYCCGFADLKYCCSEPGSYFPYKHSYMWSLRSNLSVS

SEQ ID NO: 99897 - protein, 421 aa, Homo sapiens
MVNTTNMTSAVVEFWERNMHQMTDGLDKPGQIRWPLAITLAIAWILVYFCIWKGVGWTGKVVYFSATYPYIMLIILFFRGVTLPGAKEGILFYITPNFRKLSDSEVWLDAATQIFFSYGLGLGSLIALGSYNSFHNNVYRDSIIVCCINSCTSMFAGFVIFSIVGFMAHVTKRSIADVAASGPGLAFLAYPEAVTQLPISPLWAILFFSMLLMLGIDSQFCTVEGFITALVDEYPRLLRNRRELFIAAVCIISYLIGLSNITQGGIYVFKLFDYYSASGMSLLFLVFFECVSISWFYGVNRFYDNIQEMVGSRPCIWWKLCWSFFTPIIVAGVFIFSAVQMTPLTMGNYVFPKWGQGVGWLMALSSMVLIPGYMAYMFLTLKGSLKQRIQVMVQPSEDIVRPENGPEQPQAGSSTSKEAYI

SEQ ID NO: 99898 - protein, 110 aa, Homo sapiens
MSCNPSFGGIGKGHLMREVDALDGLCSRICDQSGVHYKVLNRRKGPAVWGLRAQIDRKLYKQNMQKEILNTPLLTVQEGAVEDLILTEPEPEHTGKCRVSGVVLGWSAVA

SEQ ID NO: 99899 - protein, 1132 aa, Homo sapiens
MEPNDSTSTAVEEPDSLEVLVKTLDSQTRTFIVGAQMNVKEFKEHIAASVSIPSEKQRLIYQGRVLQDDKKLQEYNVGGKVIHLVERAPPQTHLPSGASSGTGSASATHGGGSPPGTRGPGASVHDRNANSYVMVGTFNLPSDGSAVDVHINMEQAPIQSEPRVRLVMAQHMIRDIQTLLSRMETLPYLQCRGGPQPQHSQPPPQPPAVTPEPVALSSQTSEPVESEAPPREPMEAEEVEERAPAQNPELTPGPAPAGPTPAPETNAPNHPSPAEYVEVLQELQRLESRLQPFLQRYYEVLGAAATTDYNNNHEGREEDQRLINLVGESLRLLGNTFVALSDLRCNLACTPPRHLHVVRPMSHYTTPMVLQQAAIPIQINVGTTVTMTGNGTRPPPTPNAEAPPPGPGQASSVAPSSTNVESSAEGAPPPGPAPPPATSHPRVIRISHQSVEPVVMMHMNIQDSGTQPGGVPSAPTGPLGPPGHGQTLGQQVPGFPTAPTRVVIARPTPPQARPSHPGGPPVSGTLQGAGLGTNASLAQMVSGLVGQLLMQPVLVAQGTPGMAPPPAPATASASAGTTNTATTAGPAPGGPAQPPPTPQPSMADLQFSQLLGNLLGPAGPGAGGPGVASPTITVAMPGVPAFLQGMTDFLQATQTAPPPPPPPPPPPPAPEQQTMPPPGSPSGGAGSPGGLGLESLSPEFFTSVVQGVLSSLLGSLGARAGSSESIAAFIQRLSGSSNIFEPGADGALGFFGALLSLLCQNFSMVDVVMLLHGHFQPLQRLQPQLRSFFHQHYLGGQEPTPSNIRMATHTLITGLEEYVRESFSLVQVQPGVDIIRTNLEFLQEQFNSIAAHVLHCTDSGFGARLLELCNQGLFECLALNLHCLGGQQMELAAVINGRIRRMSRGVNPSLVSWLTTMMGLRLQVVLEHMPVGPDAILRYVRRVGDPPQPLPEEPMEVQGAERASPEPQRENASPAPGTTAEEAMSRGPPPAPEGGSRDEQDGASAETEPWAAAVPPEWVPIIQQDIQSQRKVKPQPPLSDAYLSGMPAKRRKTMQGEGPQLLLSEAVSRAAKAAGARPLTSPESLSRDLEAPEVQESYRQQLRSDIQKRLQEDPNYSPQRFPNAQRAFADDP

SEQ ID NO: 99900 - protein, 105 aa, Homo sapiens
MKRSLQALYCQLLTVLLTVCCMKRKKKTANPENNLSYWNNTITMDYFNRHAVELPREIQSLETSEDQLSEPRSPANGDYRDTGMVLVNPFCQETLFVGNDQVSEI

SEQ ID NO: 99901 - protein, 152 aa, Homo sapiens
GSFPPQSCIFSQVLNMGAALAAWICIVRYHQLRDWGVRRWPNQLILWTGLLCALGTSVVGNFQEKNQRPTHLAGAFLAFILGNVYFWLQLLLWRLKRLPQPGAAWIGPLRLGLCSVCTILIVAMIVLHACSLRSVSAACEWVVAMLLFALFG

SEQ ID NO: 99902 - protein, 693 aa, Homo sapiens
MIDLFKAEWVSSVCVQVSRNGRTDQVPQDEWTGYTPRGKDDEIPCRRMRSGSYIKAMGDEDSGDSDTSPKPSPKVAARRESYLKATQPSLTELTTLKISNEHSPKLQIRSHSYLRAVSEVSINRSLDSLDPAGLLTSPKFRSRNESYMRAMSTISQVSEMEVNGQFESVCESVFSELESQAVEALDLPMPGCFRMRSHSYVRAIEKGCSQDDECVSLRSSSPPRTTTTVRTIQSSTGVIKLSSAVEVSSCITTYKKTPPPVPPRTTTKPFISITAQSSTESAQDAYMDGQGQRGDIISQSGLSNSTESLDSMKALTAAIEAANAQIHGPASQHMGNNTATVTTTTTIATVTTEDRKKDHFKKNRCLSIGIQVDDAEEPDKTGENKAPSKFQSVGVQVEEEKCFRRFTRSNSVTTAVQADLDFHDNLENSLESIEDNSCPGPMARQFSRDASTSTVSIQGSGNHYHACAADDDFDTDFDPSILPPPDPWIDSITEDPLEAVQRSVCHRDGHWFLKLLQAERDRMEGWCQQMEREERENNLPEDILGKIRTAVGSAQLLMAQKFYQFRELCEENLNPNAHPRPTSQDLAGFWDMLQLSIENISMKFDELHQLKANNWKQMDPLDKKERRAPPPVPKKPAKGPAPLIRERSLESSQRQEARKRLMAAKRAASVRQNSATESAESIEIYIPEAQTRL

SEQ ID NO: 99903 - protein, 73 aa, Homo sapiens
MEDLEETLFEEFENYSYDLDYYSLESDLEEKVQLGVVHWVSLVLYCLAFVLGIPGNAIVIWFTGFKWKKTVTT

SEQ ID NO: 99904 - protein, 176 aa, Homo sapiens
MLTSDELQFGYEVWREFPDRLVGYPGRLHLWDHEMNKWKYESEWTNEVSMVLTGAAFYHKYFNYLYTYKMPGDIKNWVDAHMNCEDIAMNFLVANVTGKAVIKVTPRKKFKCPECTAIDGLSLDQTHMVERSECINKFASVFGTMPLKVVEHRADPVLYKDDFPEKLKSFPNIGSL

SEQ ID NO: 99905 - protein, 101 aa, Homo sapiens
MSFLRITPSTHSSVSSGLLRLSIFLLLSFPDSNGKAIWTAHLNITFQGTENIVAVMISNLKGMEILHSIQKGVYVTVIIEVGRMHMQWEAKSNKDRCEESY

SEQ ID NO: 99906 - protein, 254 aa, Homo sapiens
  MOD_RES (1)..(1): Any amino acid
XATQKQFNYTHICAGASAFGKNLLPRVAAKLEVAPISDIIAIKSPDTFVRTIYAGNALCTVKCDEKVKVFSVRGTSFDAAATSGGSASSEKASSTSPVEISEWLDQKLTKSDRPELTGAKVVVSGGRGLKSGENFKLLYDLADQLHAAVGASRAAVDAGFVPNDMQVGQTGKIVAPELYIAVGISGAIQHLAGMKDSKTIVAINKDPEAPIFQVADYGIVADLFKPPWTALLCPSSHKAALHWKLQLQPLHCHD

SEQ ID NO: 99907 - protein, 235 aa, Homo sapiens
MAENDVDNELLDYEDDEVETAAGGDGAEAPAKKDVKGSYVSIHSSGFRDFLLKPELLRAIVDCGFEHPSEVQHECIPQAILGMDVLCQAKSGMGKTAVFVLATLQQLEPVTGQVSVLVMCHTRELAFQISKEYERFSKYMPNVKVAVFFGGLSIKKDEEVLKKNCPHIVVGTPGRILALARNKSLNLKHIKHFILDECDKMLEQLDMRRDVQEIFRMTPHEKQVMMFSATLSKEI

SEQ ID NO: 99908 - protein, 45 aa, Homo sapiens
MRQKRKGDLSPAELMMLTIGDVIKQLIEAHEQGKDIDLNKLLSWL

SEQ ID NO: 99909 - protein, 72 aa, Homo sapiens
FVSLGLMCFGALIGLCACICRSLYPTIATGILHLLAGLCTLGSVSCYVAGIELLHQKLELPDNPSTIKNVSP

SEQ ID NO: 99910 - protein, 353 aa, Homo sapiens
MGPLMVLFCLLFLYPAGHCPNPGISLGAVRTGFRFGHGDKVRYRCSSNLVLTGSSERECQGNGVWSGTEPICRQPYSYDFPEDVAPALGTSFSHMLGATNPTQKTKESLGRKIQIQRSGHLNLYLLLDCSQSVSENDFLIFKESASLMVDRIFSFEINVSVAIITFASEPKVLMSVLNDNSRDMTEVISSLENANYKDHENGTGTNTYAALNSVYLMMNNQMRLLGMETMAWQEIRHAIILLTDGKSNMGGSPKTAVDHIREILNINQKRNDYLDIYAIGVGKLDVDWRELNELGSKKDGERHAFILQDTKALHQVFEHMLDVSKLTDTICGVGNMSANASDQERTPWHVTIK

SEQ ID NO: 99911 - protein, 496 aa, Homo sapiens
MDNYLLLQTPLKKTKALIGEMGMTFSSAYVPSALCCPSRASILTGKYPHNHHVVNNTLEGNCSSKSWQKIQEPNTFPAILRSMCGYQTFFAGKYLNEYGAPDAGGLEHVPLGWSYWYALEKNSKYYNYTLSINGKARKHGENYSVDYLTDVLANVSLDFLDYKSNFEPFFMMIATPAPHSPWTAAPQYQKAFQNVFAPRNKNFNIHGTNKHWLIRQAKTPMTNSSIQFLDNAFRKRWQTLLSVDDLVEKLVKRLEFTGELNNTYIFYTSDNGYHTGQFSLPIDKRQLYEFDIKVPLLVRGPGIKPNQTSKMLVANIDLGPTILDIAGYDLNKTQMDGMSLLPILRGASNLTWRSDVLVEYQGEGRNVTDPTCPSLSPGVSQCFPDCVCEDAYNNTYACVRTMSALWNLQYCEFDDQEVFVEVYNLTADPDQITNIAKTIDPELLGKMNYRLMMLQSCSGPTCRTPGVFDPGYRFDPRLMFSNRGSVRTRRFSKHLL

SEQ ID NO: 99912 - protein, 85 aa, Homo sapiens
MGLLVFVRNLLLALCLFLVLGFLYYSAWKLHLLQWEEDSNSVVLSFDSAGQTLGSGTVTADWNLWWFITMKKGSGSLTTEMPVAC

SEQ ID NO: 99913 - protein, 289 aa, Homo sapiens; identical to SEQ ID NO: 50700

SEQ ID NO: 99914 - protein, 56 aa, Homo sapiens
MAFPHLQQPSFLLASLKADSINKPFAQQCQDLVKVIEDFPAKDTSHTLCFLWPPPH

SEQ ID NO: 99915 - protein, 120 aa, Homo sapiens
MKLLMVLMLAALSQHCYAGSGCPLLENVISKTINPQVSKTEYKELLQEFIDDNATTNAIDELKECFLNQTDETLSNVEVFMVISFSSYKLFKSPDQGQVGSSFLTDNAKATSEQAFSYIG

SEQ ID NO: 99916 - protein, 246 aa, Homo sapiens
MVVMAPRTLFLLLSGALTLTETWAGSHSMRYFSAAVSRPGRGEPRFIAMGYVDDTQFVRFDSDSACPRMEPRAPWVEQEGPEYWEEETRNTKAHAQTDRMNLQTLRGYYNQSEANPPKTHVTHHPVFDYEATLRCWALGFYPAEIILTWQRDGEDQTQDVELVETRPAGDGTFQKWAAVVVPSGEEQRYTCHVQHEGLPEPLMLRWKQSSLPTIPIMGIVAGLVVLAAVVTGAAVAAVLWRKKSSD

SEQ ID NO: 99917 - protein, 72 aa, Homo sapiens
MPRVKAAQAGRQSSAKRHLAEQFAVGEIITDMAKKEWKVGLPIGQGGFGCIYLADMNSSESVGSDAPCVVKV

SEQ ID NO: 99918 - protein, 63 aa, Homo sapiens
MAGTLDLDKGCTVEELLRGCIEAFAGGQAAPHLPTIPEGQLQFPAGENVPPGQVLDLRLPSGV

SEQ ID NO: 99919 - protein, 55 aa, Homo sapiens
MHPDLSPHLHTEECNVLINLLKECHKNYVENRTKSREHGIAMRKKLFNPPEESEK

SEQ ID NO: 99920 - protein, 152 aa, Homo sapiens
QFGTPRGTVWPHLQLAQGKLLKDVFRPGDVFFNTGDLLVCDDQGFLRFHDRTGDTFRWKGENVATTEVAEVFEALDFLQEVNVYGVTVPGHEGRAGMAALVLRPPHALDLMQLYTHVSENLPPYARPRFLRLQESLATTETFKQQKVRMANE

SEQ ID NO: 99921 - protein, 521 aa, Homo sapiens
MDLIWTLRQDCREIFPQSLPKLLLSIKWNKLEDVAQLQALLQIWPKLPPREALELLDFNYPDQYVREYAVGCLRQMSDEELSQYLLQLVQVLKYEPFLDCALSRFLLERALGNRRIGQFLFWHLRSEVHIPAVSVQFGVILEAYCRGSVGHMKVLSKQVEALNKLKTLNSLIKLNAVKLNRAKGKEAMHTCLKQSAYREALSDLQSPLNPCVILSELYVEKCKYMDSKMKPLWLVYNNKVFGEDSVGVIFKNGDVCFPLDLRQDMLTLQMLRLMDLLWKEAGLDLRMLPYGCLATGDRSGLIEVVSTSETIADIQLNSSNVAAAAAFNKDALLNWLKEYNSGDDLDRAIEEFTLSCAGYCVASYVLGIGDRHSDNIMVKKTGQLFHIDFGHILGNFKSKFGIKRERVPFILTYDFIHVIQQGKTGNTEKFGRFRQCCEDAYLILRRHGNLFITLFALMLTAGLPELTSVKDIQYLKDSLALGKSEEEALKQFKQKFDEALRESWTTKVNWMAHTVRKDYRS

SEQ ID NO: 99922 - protein, 121 aa, Homo sapiens
MTLTERLREKISRAFYNHGLLCASYPIPIILFTGFCILACCYPLLKLPLPGTGPVEFTTPVKDYSPPPVDSDRKQGEPTEQPEWVPGQPACPPDASAPQPQLQPSGGEPGPRALQGGDWCR

SEQ ID NO: 99923 - protein, 548 aa, Homo sapiens
MNEGAPGDSDLETEARVPWSIMGHCLRTGQARMSATPTPAGEGARSSSTCSSLSRLFWSQLEHINWDGATAKNFINLREFFSFLLPALRKAQIEIIPCKICGDKSSGIHYGVITCEGCKGFFRRSQQSNATYSCPRQKNCLIDRTSRNRCQHCRLQKCLAVGMSRDAVKFGRMSKKQRDSLYAEVQKHRMQQQQRDHQQQPGEAEPLTPTYNISANGLTELHDDLSNYIDGHTPEGSKADSAVSSFYLDIQPSPDQSGLDINGIKPEPICDYTPASGFFPYCSFTNGETSPTVSMAELEHLAQNISKSHLETCQYLREELQQITWQTFLQEEIENYQNKQREVMWQLCAIKITEAIQYVVEFAKRIDGFMELCQNDQIVLLKAGSLEVVFIRMCRAFDSQNNTVYFDGKYASPDVFKSLGCEDFISFVFEFGKSLCSMHLTEDEIALFSAFVLMSADRSWLQEKVKIEKLQQKIQLALQHVLQKNHREDGILTKLICKVSTLRALCGRHTEKLMAFKAIYPDIVRLHFPPLYKELFTSEFEPAMQIDG

SEQ ID NO: 99924 - protein, 104 aa, Homo sapiens; identical to SEQ ID NO: 60295

SEQ ID NO: 99925 - protein, 29 aa, Homo sapiens
MPITRMRMRPWLEMQINSNQIPGLIWINK

SEQ ID NO: 99926 - protein, 397 aa, Homo sapiens
LEVRPKESWNHADFVHCEDTESVPGKPSVNADEEVGGPQICRVCGDKATGYHFNVMTCEGCKGFFRRAMKRNARLRCPFRKGACEITRKTRRQCQACRLRKCLESGMKKEMIMSDEAVEERRALIKRKKSERTGTQPLGVQGLTEEQRMMIRELMDAQMKTFDTTFSHFKNFRVSLQLRGEDGSVWNYKPPADSGGKEIFSLLPHMADMSTYMFKGIISFAKVISYFRDLPIEDQISLLKGAAFELCQLRFNTVFNAETGTWECGRLSYCLEDTAGGFQQLLLEPMLKFHYMLKKLQLHEEEYVLMQAISLFSPDRPGVLQHRVVDQLQEQFAITLKSYIECNRPQPAHRFLFLKIMAMLTELRSINAQHTQRLLRIQDIHPFATPLMQELFGITGS

SEQ ID NO: 99927 - protein, 235 aa, Homo sapiens
MRLRLRLLALLLLLLAPPARAPKPSAQDVSLGVDWLTRYGYLPPPHPAQAQLQSPEKLRDAIKVMQRFAGLPETGRMDPGTVATMRKPRCSLPDVLGVAGLVRRRRRYALSGSVWKKRTLTWRVRSFPQSSQLSQETVRVLMSYALMAWGMESGLTFHEVDSPQGQEPDILIDFARAFHQDSYPFDGLGGTLAHAFFPGEHPISGDTHFDDEETWTFGSKGLSAAGAGAGRRLTG

SEQ ID NO: 99928 - protein, 288 aa, Homo sapiens
MLVAIIIHAVIQEYMLDKINRRMHFSKTKHSKFNESGQLSAFYLFACVWGTFILISENYISDPTILWRAYPHNLMTFQMKFFYISQLAYWLHAFPELYFQKTKKEDIPRQLVYIGLYLFHIAGAYLLNLNHLGLVLLVLHYFVEFLFHISRLFYFSNEKYQKGFSLWAVLFVLGRLLTLILSVLTVGFGLARAENQKLDFSTGNFNVLAVRIAVLASICVTQAFMMWKFINFQLRRWREHSAFQAPAVKKKPTVTKGRSSKKGTENGVNGTLTSNVADSPRNKKEKSS

SEQ ID NO: 99929 - protein, 115 aa, Homo sapiens
MVMEKPSPLLVGREFVRQYYTLLNKAPEYLHRFYGRNSSYVHGGVDASGKPQEAVYGQNDIHHKVLSLNFSECHTKIRHVDAHATLSDGVVVQVMGLLSNSGQPERKFMQTFVLA

SEQ ID NO: 99930 - protein, 315 aa, Homo sapiens
MASKRKSTTPCMIPVKTVVLQDASMEAQPAETLPEGPQQDLPPEASAASSEAAQNPSSTDGSTLANGHRSTLDGYLYSCKYCDFRSHDMTQFVGHMNSEHTDFNKDPTFVCSGCSFLAKTPEGLSLHNATCHSGEASFVWNVAKPDNHVVVEQSIPESTSTPDLAGEPSAEGADGQAEIIITKTPIMKIMKGKAEAKKIHTLKENVPSQPVGEALPKLSTGEMEKQTEFDLINVKDWPVWETACHVEEPNPTLCCHMPFPCPAAGHLGELPESSQTAQSLPLPSACPPPSKQQARWGSHQFFLPQCRTFPLPSNG

SEQ ID NO: 99931 - protein, 431 aa, Homo sapiens
MLVHLFRVGIRGGPFPGRLLPPLRFQTFSAVRYSDGYRSSSLLRAVAHLRSQLWAHLPRAPLAPRWSPSAWCWVGGALLGPMVLSKHPHLCLVALCEAEEAPPASSTPHVVGSRFNWKLFWQFLHPHLLVLGVAVVLALGAALVNVQIPLLLGQLVEVVAKYTRDHVGSFMTESQNLSTHLLILYGVQGLLTFGYLVLLSHVGERMAVDMRRALFSSLLRQDITFFDANKTGQLVSRLTTDVQEFKSSFKLVISQGLRSCTQVAGCLVSLSMLSTRLTLLLMVATPALMGVGTLMGSGLRKLSRQCQEQIARAMGVADEALGNVRTVRAFAMEQREEERYGAELEACRCRAEELGRGIALFQGLSNIAFNCMVLGTLFIGGSLVAGQQLTGGDLMSFLVASQTVQSFLRVAPCPNSLPLQAVTFHAWKDHP

SEQ ID NO: 99932 - protein, 139 aa, Homo sapiens
MRLNQNTLLLGKKVVLVPYTSEHVPRYHEWMKSEELQRLTASEPLTLEQEYAMQCSWQEDADKCTFIVLDAEKWQAQPGATEESCMVGDVNLFLTDLEDLTLGEIEVMIAEPSCRGKGLGTEAVLAMLSYGGDPQTDSE

SEQ ID NO: 99933 - protein, 280 aa, Homo sapiens
VYTYLRLIVDHHGTAQLQALRQKEVDFCISLLRERFMECLMIGRDLVRLLQNVARIPEFELLWKDIIHNPQALSPQFTGILQLLQSRTSRKFLACRLTPDMETKLLFMTSRVRFGQQKRYQDWFQRQYLSTPDSQSLRCDLIRYICGVVHPSNEVLSSDILPRWAIIGWLLTTCTSNVAASNAKLALFYDWLFFSPDKDSIMNIEPAILVMHHSMKPHPAITATLLDFMCRIIPNFYPPLEGHVRQGVFSSLNHIVEKRVLACKKYWLYLRLLGICLLGS

SEQ ID NO: 99934 - protein, 321 aa, Homo sapiens
MLVCASPPPLPALTGLRDDKLTLLSSSPGLGGTPGETVRHCSAPEDPIFRFSSLHSYPFPGTIKSRDMSWKRHHLIPETFGVKRRRKRGPVESDPLRGEPGSARAAVSELMQLFPRGLFEDALPPIVLRSQVYSLVPDRTVADRQLKELQEQGEIRIVQLGFDLDAHGIIFTEDYRTRVLKACDGRPYAGAVQKFLASVLPACGDLSFQQDQMTQTFGFRDSEITHLVNAGVLTVRDAGSWWLAVPGAGRFIKYFVKGRQAVLSMVRKAKYRELLLSELLGRRAPVVVRLGLTYHVHDLIGAQLVDCISTTSGTLLRLPET

SEQ ID NO: 99935 - protein, 186 aa, Homo sapiens
MVPRPWSGSPGPGECLHSLLSERLWICRDISAQRRSAPGSPRPSDCQQLSFLPGNQPTFLCLQALAALVPGVTQVDNKSGFLQKRPHRQHPGILKLPHVRLPQALANGAQLLLLGSAGPTMENQVQTLTSYLWSRHLPVEPEELQRRARHLEKKFLENPDLSQTEEKLRGAVLHALRKTTYHWQEL

SEQ ID NO: 99936 - protein, 95 aa, Homo sapiens
MMAGMKIQLVCMLLLAFSSWSLCSDSEEEMKALEADFLTNMHTSKLIQEDILDTGNDKNGKEEVIKRKIPYILKRQLYENKPRRPYILKRDSYYY

SEQ ID NO: 99937 - protein, 124 aa, Homo sapiens
MQDEERYMTLNVQSKKRSSAQTSQLTFKDYSVTLHWYKILLGISGTVNGILTLTLISLILLVSQGVLLKCQKGSCSNATQYEDTGDLKVNNGTRRNISNKDLCASRSADQTVPRPHFRLLYRKT

SEQ ID NO: 99938 - protein, 47 aa, Homo sapiens
MGGEIQPVSVKVGDKVLLPEYGGTKVVLDDKDYFLFRDGDILGKYVD

SEQ ID NO: 99939 - protein, 428 aa, Homo sapiens
MSDHGDVSLPPEDRVRALSQLGSAVEVNEDIPPRRYFRSGVEIIRMASIYSEEGNIEHAFILYNKYITLFIEKLPKHRDYKSAVIPEKKDTVKKLKEIAFPKAEELKAELLKRYTKEYTEYNEEKKKEAEELARNMAIQQELEKEKQRVAQQKQQQLEQEQFHAFEEMIRNQELEKERLKIVQEFGKVDPGLGGPLVPDLEKPSLDVFPTLTVSSIQPSDCHTTVRPAKPPVVDRSLKPGALSNSESIPTIDGLRHVVVPGRLCPQFLQLASANTARGVETCGILCGKLMRNEFTITHVLIPKQSAGSDYCNTENEEELFLIQDQQGLITLGWIHTHPTQTAFLSSVDLHTHCSYQMMLPESVAIVCSPKFQETGFFKLTDHGLEEISSCRQKGFHPHSKDPPLFCKPKLHCPFNVGIQPDPILGQHQ

SEQ ID NO: 99940 - protein, 161 aa, Homo sapiens
MSAAGAGAGVEAGFSSEELLSLRFPLHRACRDGDLATLCSLLQQTPHAHLASEDSFYGWTPVHWAAHFGKLECLVQLVRAGATLNVSTTRYAQTPAHIAAFGGHPQCLVWLIQAGANINKPDCEGETPIHKAARSGSLECISALVANGAHVDNPRKGEHSI

SEQ ID NO: 99941 - protein, 269 aa, Homo sapiens
MEELEKELDVVDPDGSVPVGLRQRNQTEKQSTGVYNREAMLNFCEKETKKLMQREMSMDESKQVETKTDAKNGEERGRDASKKALGPRRDSDLGKEPKRGGLKKSFSRDRDEAGGKSGEKPKEEKIIRGIDKGRVRAAVDKKEAGKDGRGEERAVATKKEEEKKGSDRNTGLSRDKDKKREEMKEVAKKEDDEKVKGGAPAAPPPPPPPLAPPLIMENLKNSLSPATQRKMGDKVLPAQEKNSRDQLLAAIRSSNLKQLKKVEVPKLLQ

SEQ ID NO: 99942 - protein, 939 aa, Homo sapiens
MSASSEGPRLALASPRPILAPLCTPEGQKTATAHRSSSLAPTSVGQLVMSASAGPKPPPATTGSVLAPTSLGLVMPASAGPRSPPVTLGPNLAPTSRDQKQEPPASVGPKPTLAASGLSLALASEEQPPELPSTPSPVPSPVLSPTQEQALAPASTASGAASVGQTSARKRDAPAPRPLPASEGHLQPPAQTSGPTGSPPCIQTSPDPRLSPSFRARPEALHSSPEDPVLPRPPQTLPLDVGQGPSEPGTHSPGLLSPTFRPGAPSGQTVPPPLPKPPRSPSRSPSHSPNRSPCVPPAPDMALPRLGTQSTGPGRCLSPNLQAQEAPAPVTTSSSTSTLSSSPWSAQPTWKSDPGFRITVVTWNVGTAMPPDDVTSLLHLGGGDDSDGADMIAIGLQEVNSMLNKRLKDALFTDQWSELFMDALGPFNFVLVSSVRMQGVILLLFAKYYHLPFLRDVQTDCTRTGLGGYWGNKGGVSVRLAAFGHMLCFLNCHLPAHMDKAEQRKDNFQTILSLQQFQGPGAQGILDHDLVFWFGDLNFRIESYDLHFVKFAIDSDQLHQLWEKDQLNMAKNTWPILKGFQEGPLNFAPTFKFDVGTNKYDTSAKKRKPAWTDRILWKVKAPGGGPSPSGRKSHRLQVTQHSYRSHMEYTVSDHKPVAAQFLLQFAFRDDMPLVRLEVADEWVRPEQAVVRYRMETVFARSSWDWIGLYRVGFRHCKDYVAYVWAKHEDVDGNTYQVTFSEESLPKGHGDFILGYYSHNHSILIGITEPFQISLPSSELASSSTDSSGTSSEGEDDSTLELLAPKSRSPSPGKSKRHRSRSPGLARFPGLALRPSSRERRGASRSPSPQSRRLSRVAPDRSSNGSSRGSSEEGPSGLPGPWAFPPAVPRSLGLLPALRLETVDPGGGGSWGPDREALAPNSLSPSPQGHRGLEEGGLGP

SEQ ID NO: 99943 - protein, 254 aa, Homo sapiens; identical to SEQ ID NO: 17981

SEQ ID NO: 99944 - protein, 194 aa, Homo sapiens
MLCDTMGLDGAEGAGLCMDDIPHILKGCMPDRYQFNSRKPITPEHSTFITSPSLKDRIHCVAYVLDINSIDNLYSKMLAKVKQVHKEVLNCGIAYVALLTKVDDCSEVLQDNFLNMSRSMTSQSRVMNVHKMLGIPISNILMVGNYASDLELDPMKDILILSALRQMLRAADDFLEDLPLEETGAIERALQPCI

SEQ ID NO: 99945 - protein, 197 aa, Homo sapiens
MDPPAGFVRAGNPAVAAPQSPLSPEGAHFRAAHHPRSTGSRCPGSLQPSRPLVANWLQSLPEMPVDFTGYWKMLVNENFEEYLRALDVNVALRKIANLLKPDKEIVQDGDHMIIRTLSTFRNYIMDFQVGKEFEEDLTGIDDRKCMTTVSWDGDKLQCVQKGEKEGRGWTQWIEGDELHLEMRVEGVVCKQVFKKVQ

SEQ ID NO: 99946 - protein, 308 aa, Homo sapiens
MAPRRARGCRTLGLPALLLLLLLRPPATRDARDRLAVLAGRSRISESFNHEVQTHEACVRLRTMENCPQCHHHRTSRQQAGITCPPPMSVEHADIWVKSYSLYSRERYICNSGFKRKAGTSSLTECVLNKATNVAHWTTPSLKCIRDPALVHQRPAPPSTVTTAGVTPQPESLSPSGKEPAASSPSSNNTAATTAAIVPGSQLMPSKSPSTGTTEISSHESSHGTPSQTTAKNWELTASASHQPPGVYPQGHSDTTVAISTSTVLLCGLSAVSLLACYLKSSLDAFIKIRGGFSTWLLGLPHSTVGSG

SEQ ID NO: 99947 - protein, 65 aa, Homo sapiens
  MOD_RES (1)..(1): Any amino acid
XTEDALEVRRQSLATLPFMPLVERTRHQAPSWLPALWPIAFLSQPQPQRSKLPGGAFTGGRNSSG

SEQ ID NO: 99948 - protein, 79 aa, Homo sapiens
MAFLLATCGGLDSGFVPSVQDFDKKLTEADAYLQILIEQLKLFDDKLQNCKEDEQRKKIETLKETTNRWDSAMLPRLVS

SEQ ID NO: 99949 - protein, 58 aa, Homo sapiens
MAGHPKEKVIPDEVHQNQILRELYLKELRTQKLYTQYHVNPLRKSESSYSHQEAHVLA

SEQ ID NO: 99950 - protein, 298 aa, Homo sapiens
MEGKHKEELDTLKEEKENLQGLVTRQTYIIQELEKQLNRATTNNSVLQKQQLELMDTVHNLVNLCTKEGVLLKGGKREEEKPFRDCADVYQAGFNKSGIYTIYINNMPEPKKVFCNMDVNGGGWTVIQHREDGSLDFQRGWKEYKMGFGNPSGEYWLGNEFIFAITSQRQYMLRIELMDWEGNRAYSQYDRFHIGNEKQNYRLYLKGHTGTAGKQSSLILHGADFSTKDADNDNCMCKCALMLTGGWWFDACGPSNLNGMFYTAGQNHGKLNGIKWHYFKGPSYSLRSTTMMIRPLDF

SEQ ID NO: 99951 - protein, 145 aa, Homo sapiens
MEGDFSVCRNCKRHVVSANFTLHEAYCLRFLVLCPECEEPVPKETMEEHCKLEHQQANECQERPVECKFCKLDMQLSKLELHESYCGSRTELCQGCGQFIMHRMLAQHRDVCRSEQAQLGKETSPDPGKCLSITVAAALSAHLWP

SEQ ID NO: 99952 - protein, 200 aa, Homo sapiens
MSPEPALSPALQLLLWHSALWTVQEATPLGPASSLPQSFLLKCLEQVRKIQGDGAALQEKLCATYKLCHPEELVLLGHSLGIPWAPLSSCPSQALQLAGCLSQLHSGLFLYQGLLQALEGISPELGPTLDTLQLDVADFATTIWQQMEELGMAPALQPTQGAMPAFASAFQRRAGGVLVASHLQSFLEVSYRVLRHLAQP

SEQ ID NO: 99953 - protein, 93 aa, Homo sapiens
MLGLWGQRLPAAWVLLLLPFLPLLLLAAPAPHRASYKPVIVVHGLFDSSYSFRHLLEYINEGALCAGLCFLSWMITTWILSSPSPLHRWDSME

SEQ ID NO: 99954 - protein, 98 aa, Homo sapiens
MQRAGSKTAGPPCQWSRMASEGTNIPSPVVRQIDKQFLICSICLERYKNPKVLPCLHTFCESVPPDLHPARERGGRAPEQFLHHKPDGRAAANSRQQR

SEQ ID NO: 99955 - protein, 97 aa, Homo sapiens
MLGLWGQRLPAAWVLLLLPFLPLLLLAAPAPHRASYKPVIVVHGLFDSSYSFRHLLEYINEGALCAGLCFLSWMITTWILSSPSPLHRWDSMETRTT

SEQ ID NO: 99956 - protein, 318 aa, Homo sapiens
MEGNQTWITDITLLGFQVGPALAILLCGLFSVFYTLTLLGNGVIFGIICLDSKLHTPMYFFLSHLAIIDMSYASNNVPKMLANLMNQKRTISFVPCIMQTFLYLAFAVTECLILVVMSYDRYVAICHPFQYTVIMSWRVCTILVLTSWSCGFALSLVHEILLLRLPFCGPRDVNHLFCEILSVLKLACADTWVNQVVIFATCVFVLVGPLSLILVSYMHILGAILKIQTKEGRIKAFSTCSSHLCVVGLFFGIAMVVYMVPDSNQREEQEKMLSLFHSVLNPMLNPLIYSLRNAQLKGALHRALQRKRSMRTVYGLCL

SEQ ID NO: 99957 - protein, 393 aa, Homo sapiens
MELEVRRVRQAFLSGRSRPLRFRLQQLEALRRMVQEREKDILTAIAADLCKSEFNVYSQEVITVLGEIDFMLENLPEWVTAKPVKKNVLTMLDEAYIQPQPLGVVLIIGAWNYPFVLTIQPLIGAIAAGNAVIIKPSELSENTAKILAKLLPQYLDQDLYIVINGGVEETTELLKQRFDHIFYTGNTAVGKIVMEAAAKHLTPVTLELGGKSPCYIDKDCDLDIVCRRITWGKYMNCGQTCIAPDYILCEASLQNQIVWKIKETVKEFYGENIKESPDYERIINLRHFKRILSLLEGQKIAFGGETDEATRYIAPTVLTDVDPKTKVMQEEIFGPILPIVPVKNVDEAINFINEREKPLALYVFSHNHKVPVGWELITENIVLILFLISVPVY

SEQ ID NO: 99958 - protein, 237 aa, Homo sapiens
MGRQKELVSRCGEMLHIRYRLLRQALAECLGTLILVMFGCGSVAQVVLSRGTHGGFLTINLAFGFAVTLGILIAGQVSGAHLNPAVTFAMCFLAREPWIKLPIYTLAQTLGAFLGAGIVFGLYYDAIWHFADNQLFVSGPNGTAGIFATYPSGHLDMINGFFDQDRPALVVGAHRVPTPGLHCGCLRVPADDRLPPGAAPTLQRGRECEAGPCEAQGADLSGQGPSPHSAALALSIH

SEQ ID NO: 99959 - protein, 69 aa, Homo sapiens
MDVERLQEALKDFEKRGKKEVCPVLDQFLCHVAKTGETMLASKPWPQVIHLPQLPKLRGLQIRDGVSPC

SEQ ID NO: 99960 - protein, 263 aa, Homo sapiens
MGRAELLEGKMSTQDPSDLWSRSDGEAELLQDLGWYHGNLTRHAAEALLLSNGCDGSYLLRDSNETTGLYSLSVRAKDSVKHFHVEYTGYSFKFGFNEFSSLKDFVKHFANQPLIGSETGTLMVLKHPYPRKVEEPSIYESVRVHTAMQTGRTEDDLVPTAPSLGTKEGYLTKQGGLVKTWKTRWFTLHRNELKYFKDQMSPEPIRILDLTECSAVQFDYSQERVNCFCLVFPFRTFYLCAKTGVEADEWIKILRWKLVKDKS

SEQ ID NO: 99961 - protein, 40 aa, Homo sapiens
MYHSLSETRHPLQPEEQEVGIDPLSSYSNKSGGKNGKNYL

SEQ ID NO: 99962 - protein, 14 aa, Homo sapiens
MERKFMSLQPSISV

SEQ ID NO: 99963 - protein, 56 aa, Homo sapiens
MPASWTSPQKSSALAPEDHGSSYEVYRYHFQRNDVLSPISTINMHHKRQTVISECS

SEQ ID NO: 99964 - protein, 142 aa, Homo sapiens
MAAEEMHWPVPMKAIGAQNLLTMPGGVAKAGYLHKKGGTQLQLLKWPLRFVIIHKRCVYYFKSSTSASPQGAFSLSGYNRVMRAAEETTSNNVFPFKIIHISKKHRTWFFSASSEEERKSWMALLRREIGHFHEKKDLPLDT

SEQ ID NO: 99965 - protein, 365 aa, Homo sapiens
MAVMAPRTLLLLLLGALALTQTWAGSHSMRYFTTSVSRPGRGEPRFIAVGYVDDTQFVRFDSDAASQRMEPRAPWIEQEGPEYWDLQTRNVKAQSQTDRANLGTLRGYYNQSEAGSHTIQMMYGCDVGSDGRFLRGYRQDAYDGKDYIALNEDLRSWTAADMAAQITQRKWEAARVAEQLRAYLEGTCVEWLRRYLENGKETLQRTDAPKTHMTHHAVSDHEATLRCWALSFYPAEITLTWQRDGEDQTQDTELVETRPAGDGTFQKWASVVVPSGQEQRYTCHVQHEGLPKPLTLRWEPSSQPTIPIVGIIAGLVLFGAVFAGAVVAAVRWRRKSSDRKGGSYSQAASSDSAQGSDMSLTACKV

SEQ ID NO: 99966 - protein, 148 aa, Homo sapiens
MPASWTSPQKSSALAPEDHGSSYEGSVSFRDVAIDFSREEWRHLDLSQRNLYRDVMLETYSHLLSVGYQVPKPEVVMLEQGKEPWALQGERPRHSCPGFWVSLGSPWARFSSRLQPISSEQLCLSSQMTAKLQTPYRKRVETQCGHAS

SEQ ID NO: 99967 - protein, 231 aa, Homo sapiens
MSWKMALQIPGGFWAAAVTVMLVMLSTPVAEARDFPKDFLVQFKGMCYFTNGTERVRGVARYIYNREEYGRFDSDVGEFQAVTELGRSIEDWNNYKDFLEQERAAVDKVCRHNYEAELRTTLQRQVEPTVTISPSRTEALNHHNLLVCSVTDFYPAQIKVQWFRNDQEETAGVVSTSLIRNGDWTFQILVMLEITPQRGDIYTCQVEHPSLQSPITVEWRPRGPPPAGLLH

SEQ ID NO: 99968 - protein, 385 aa, Homo sapiens
MLRTILDAPQRLLKEGRASRQLVLVVVFVALLLDNMLFTVVVPIVPTFLYDMEFKEVNSSLHLGHAGSSPHALASPAFSTIFSFFNNNTVAVEESVPSGIAWMNDTASTIPPPATEAISAHKNNCLQGTGFLEEEITRVGVLFASKAVMQLLVNPFVGPLTNRIGYHIPMFAGFVIMFLSTVMFAFSGTYTLLFVARTLQGIGSSFSSVAGLGMLASVYTDDHERGRAMGTALGGLALGLLVGAPFGSVMYEFVGKSAPFLILAFLALLDGALQLCILQPSKVSPESAKGTPLFMLLKDPYILVAAGSICFANMGVAILEPTLPIWMMQTMCSPKWQLGLAFLPASVSYLIGTNLFGVLANKMGRWLCSLIGMLVVGTSLLCLPS

SEQ ID NO: 99969 - protein, 126 aa, Homo sapiens
MAIFSVYVVNKAGGLIYQLDSYAPRAEAEKTFSYPLDLLLKLHDERVLVAFGQRDGIRVGHAVLAINGMDVNGRYTADGKEVLEYLGNPANYPVSIRFGRPRLTSNEKLMLASMFHSDQVCGSSRS

SEQ ID NO: 99970 - protein, 62 aa, Homo sapiens
MSHQPLSCLTEKEDSPSESTGNGPPHLAHPNLDTFTPEELLQQMKELLTENHQLKEPCGQVD

SEQ ID NO: 99971 - protein, 549 aa, Homo sapiens
  MOD_RES (1)..(1): Any amino acid
XGAVAIPSWGKFWLAVLNVYSWEGLNTLFPEMWLFPDWAPAHPSTLWCHCRQVYLPMSYCYAVRLSAAEDPLVQSLRQELYVEDFASIDWLAQRNNVAPDELYTPHSWLLRVVYALLNLYEHHHSAHLRQRAVQKLYEHIVADDRFTKSISIGPISKTINMLVRWYVDGPASTAFQEHVSRIPDYLWMGLDGMKMQGTNGSQIWDTAFAIQALLEAGGHHRPEFSSCLQKAHEFLRLSQVPDNPPDYQKYYRQMRKGGFSFSTLDCGWIVSDCTAEALKAVLLLQEKCPHVTEHIPRERLCDAVAVLLNMRNPDGGFATYETKRGGHLLELLNPSEVFGDIMIDYTYVECTSAVMQALKYFHKRFPEHRAAEIRETLTQGLEFCRRQQRADGSWEGSWGVCFTYGTWFGLEAFACMGQTYRDGTACAEVSRACDFLLSRQMADGGWGEDFESCEERRYLQSAQSQIHNTCWAMMGLMAVRHPDIEAQERGVRCLLEKQLPNGDWPQENIAGVFNKSCAISYTSYRNIFPIWALGRFSQLYPERALAGHP

SEQ ID NO: 99972 - protein, 142 aa, Homo sapiens
MYSGNRSGGHGYWDGGGAAGAEGPAPAGTLSPAPLFSPGTYERLALLLGSIGLLGVGNNLLVLVLYYKFQRLRTPTHLLLVNISLSDLLVSLFGVTFTFVSCLRNGWVWDTVGCVWDGFSGSLFASLCGRSSDNSSDQDFKI

SEQ ID NO: 99973 - protein, 101 aa, Homo sapiens
MYKDSHHPARTAHYGSLPQKSHGRTQDENPVVHFFKNIVTPRTPPPSQGKGRGLSLSRFSWGAEGQRPGFGYGGRASDYKSAHKGFKGVDAQGTLSKIFKL

SEQ ID NO: 99974 - protein, 61 aa, Homo sapiens
MPITRMRMRPWLEMQINSNQIPGLIWINKEMIFQIPWKHAAKHGWDINKDACLFRSWAIHT

SEQ ID NO: 99975 - protein, 124 aa, Homo sapiens
MGNAAAAKKGSEQESVKEFLAKAKEDFLKKWESPAQPSQPTSACFKRVSQLQSDQVLLVYPGTGYGKRGSRLTPAPTHTPIPPNHRPHLLRANERSANLPFGVILPGKERFLVTCSVGCLLEFF

SEQ ID NO: 99976 - protein, 695 aa, Homo sapiens
MAAAPSTVTPLAAESSPQEATVSAASSSSYTACAAAAAAAAAAAVIVPASSATSAPACPPAGGCGDGGGGGFGGSTMAAAGRGGSSFKVDTRPCLREDAIWNEQEKAELFTDKFCQVCGVMLQFESQRISHYEGEKHAQNVSFYFQMHGEQNEVPGKKMKMHVENFQVHRYEGVDKNKFCDLCNMMFSSPLIAQSHYVGKVHAKKLKQLMEEHDQASPSGFQPEMAFSMRTYVCHICSIAFTSLDMFRSHMQGSEHQIKESIVINLVKNSRKTQDSYQNECADYINVQKARGLEAKTCFRKMEESSLETRRYREVVDSRPRHRMFEQRLPFETFRTYAAPYNISQAMEKQLPHSKKTYDSFQDELEDYIKVQKARGLDPKTCFRKMRENSVDTHGYREMVDSGPRSRMCEQRFSHEASQTYQRPYHISPVESQLPQWLPTHSKRTYDSFQDELEDYIKVQKARGLEPKTCFRKIGDSSVETHRNREMVDVRPRHRMLEQKLPCETFQTYSGPYSISQVVENQLPHCLPAHDSKQRLDSISYCQLTRDCFPEKPVPLSLNQQENNSGSYSVESEVYKHLSSENNTADHQAGHKRKHQKRKRHLEEGKERPEKEQSKHKRKKSYEDTDLDKDKSIRQRKREEDRVKVSSGKLKHRKKKKSHDVPSEKEERKHRKEKKKSVEERTEEEMLWDESILGF

SEQ ID NO: 99977 - protein, 64 aa, Homo sapiens
MSEVEHFMPILMEKEEEGMLSPILAHGGVRFMWIKHNNLYLVATSKKNACVSLVFSFLYKVVQV

SEQ ID NO: 99978 - protein, 748 aa, Homo sapiens
MDSKKRSSTEAEGSKERGLVHIWQAGSFPITPERLPGWGGKTVLQAALGVKHGVLLTEDGEVYSFGTLPWRSGPVEICPSSPILENALVGQYVITVATGSFHSGAVTDNGVAYMWGENSAGQCAVANQQYVPEPNPVSIADSEASPLLAVRILQLACGEEHTLALSISREIWAWGTGCQLGLITTAFPVTKPQKVEHLAGRVVLQVACGAFHSLALVQCLPSQDLKPVPERCNQCSQLLITMTDKEDHVIISDSHCCPLGVTLTESQAENHASTALSPSTETLDRQEEVFENTLVANDQSVATELNAVSAQITSSDAMSSQQNVMGTTEISSARNIPSYPDTQAVNEYLRKLSDHSVREDSEHGEKPVPSQPLLEEAIPNLHSPPTTSTSALNSLVVSCASAVGVRVAATYEAGALSLKKVMNFYSTTPCETGAQAGSSAIGPEGLKDSREEQVKQESMQGKKSSSLVDIREEETEGGSRRLSLPGLLSQVSPRLLRKAARVKTRTVVLTPTYSGEADALLPSLRTEVWTWGKGKEGQLGHGDVLPRLQPLCVKCLDGKEVIHLEAGGYHSLALTAKSQVYSWGSNTFGQLGHSDFPTTVPRLAKISSENGVWSIAAGRDYSLFLVDTEDFQPGLYYSGRQDPTEGDNLPENHSGSKTPVLLSCSKLGYISRVTAGKDSYLALVDKNIMGYIASLHELATTERRFYSKLSDIKSQILRPLLSLGIAHLLQISWLWEDSSFLLSLPLIS

SEQ ID NO: 99979 - protein, 142 aa, Homo sapiens
MFVDNRIQKSMLLDLNKEIMNELGVTVVGDIIAILKHAKVVHRQDMCKAATESVPCSPSPLAGEIRRGTSAASRMITNSLNHDSPPSTPPRRPDTSTSKISVTVSNKMAAKSAKATAALARREEESLAVPAKRRRVTAEMEG

SEQ ID NO: 99980 - protein, 185 aa, Homo sapiens
MARDYDHLFKLLIIGDSGVGKSSLLLRFADNTFSGSYITTIGVDFKIRTVEINGEKVKLQIWDTAGQERFRTITSTAESFVNVKRWLHEINQNCDDVCRILVGNKNDDPERKVVETEDAYKFAGQMGIQLFETSAKENVNVEEMFNCITELVLRAKKDNLAKQQQQQQNDVVKLTKNSKRKKRCC

SEQ ID NO: 99981 - protein, 90 aa, Homo sapiens
MPIIPAFWEAEAGGSREEEFETSLANMIEKKLEPLSQDEDQHADLTQSRRPLTSCTIFLGYTSNLISSGIRETIRYLVQHNMVGTWWTYW

SEQ ID NO: 99982 - protein, 323 aa, Homo sapiens
MTINPIYEHVGYTTLNREPAYKKHMPVLKETHDERDSTGQDGVSEKRLTSLVRRATLKENEQIPKYEKIHNFKVHTFRGPHWCEYCANFMWGLIAQGVKCADCGLNVHKQCSKMVPNDCKPDLKHVKKVYSCDLTTLVKAHTTKRPMVVDMCIREIESRGLNSEGLYRVSGFSDLIEDVKMAFDRDGEKADISVNMYEDINIITGALKLYFRDLPIPLITYDAYPKFIESAKIMDPDEQLETLHEALKLLPPAHCETLRYLMAHLKRVTLHEKENLMNAENLGIVFGPTLMRSPELDAMAALNDIRYQRLVVELLIKNEDILF

SEQ ID NO: 99983 - protein, 64 aa, Homo sapiens
TVGEEDEVSIKEAAEAVVEAMDFHGEVTFDTTKSDGQFKKTASNSKLRTYLPDFRFTPFKQGEP

SEQ ID NO: 99984 - protein, 657 aa, Homo sapiens
MLSLLVWILTLSDTFSQVPPEDTRIDGGPVILLQAGTPHNLTCRAFNAKPAATIIWFRDGTQQEGAVASTELLKDGKRETTVSQLLINPTDLDIGRVFTCRSMNEAIPSGKETSIELDVHHPPTVTLSIEPQTVQEGERVVFTCQATANPEILGYRWAKGGFLIEDAHESRYETNVDYSFFTEPVSCEVHNKVGSTNVSTLVNVHFAPRIVVDPKPTTTDIGSDVTLTCVWVGNPPLTLTWTKKDSNMVLSNSNQLLLKSVTQADAGTYTCRAIVPRIGVAEREVPLYVNGPPIISSEAVQYAVRGDGGKVECFIGSTPPPDRIAWAWKENFLEVGTLERYTVERTNSGSGVLSTLTINNVMEADFQTHYNCTAWNSFGPGTAIIQLEEREVLPVGIIAGATIGASILLIFFFIALVFFLYRRRKGSRKDVTLRKLDIKVETVNREPLTMHSDREDDTASVSTATRVMKAIYSSFKDDVDLKQDLRCDTIDTREEYEMKDPTNGYYNVRAHEDRPSSRAVLYADYRAPGPARFDGRPSSRLSHSSGYAQLNTYSRGPASDYGPEPTPPGPAAPAGTDTTSQLSYENYEKFNSHPFPGAAGYPTYRLGYPQAPPSGLERTPYEAYDPIGKYATATRFSYTSQHSDYGQRFQQRMQTHV

SEQ ID NO: 99985 - protein, 103 aa, Homo sapiens
MAPRPPTAAPQESVTFKDVSVDFTQEEWYHVDPAQRSLYRDVMLENYSHLVSLGYQVSKPEVIFKLEQGEEPWISEGEIQRPFYPDWKTRPEVKSSHLQQDVS

SEQ ID NO: 99986 - protein, 60 aa, Homo sapiens
MTLEEFSAGEQKTERMDKVGDALEEVLSKALSQRTITVGVYEAAKLLNVIHIHLNGRILP

SEQ ID NO: 99987 - protein, 370 aa, Homo sapiens
MPIAFNEPLSFLQRITEYMEHVYLIHRASCQPQPLERMQSVAAFAVSAVASQWERTGKPFNPLLGETYELIREDLGFRFISEQVSHHPPISAFHSEGLNHDFLFHGSIYPKLKFWGKSVEAEPRGTITLELLKHNEAYTWTNPTCCVHNVIIGKLWIEQYGTVEILNHRTGHKCVLHFKPCGLFGKELHKVEGHIQDKNKKKLFMIYGKWTECLWGIDPVSYESFKKQERRGDHLRKAKLDEDSGKADSDVADDVPVAQETVQVIPGSKLLWRINTRPPNSAQIWPARRRSGWRRSREKHGGSGPRRRQSGRRGGSTQAITPTLGPPTGCMQGITLSGISPTAQISTEGLEGPGARDRRLTRLDFLEWPL

SEQ ID NO: 99988 - protein, 128 aa, Homo sapiens
MADSSGQQAPDYRSILSISDEAARAQALNEHLSTRSYVQGYSLSQADVDAFRQLSAPPADPQLFHVARWFRHIEALLGSPCGKGQPCRLQASKGRRVQPQWSPPAGTQPCRLHLYNSLTRNKCFLHFL

SEQ ID NO: 99989 - protein, 376 aa, Homo sapiens
MVDTEMPFWPTNFGISSVDLSVMEDHSHSFDIKPFTTVDFSSISTPHYEDIPFTRTDPVVADYKYDLKLQEYQSAIKVEPASPPYYSEKTQLYNKPHEEPSNSLMAIECRVCGDKASGFHYGVHACEGCKGFFRRTIRLKLIYDRCDLNCRIHKKSRNKCQYCRFQKCLAVGMSHNAIRFGRMPQAEKEKLLAEISSDIDQLNPESADLRALAKHLYDSYIKSFPLTKAKARAILTGKTTDKSPFVIYDMNSLMMGEDKIKFKHITPLQEQSKEVAIRIFQGCQFRSVEAVQEITEYAKSIPGFVNLDLNDQVTLLKYGVHEIIYTMLASLMNKDGVLISEGQGFMTREFLKSLRKPFGDFMEPKFEFAVKFNALE

SEQ ID NO: 99990 - protein, 584 aa, Homo sapiens
MREQLKGHETQTTCWDHPKMTELYQSLADLNNVRFSAYRTAMKLRRLQKALCLDLLSLSAACDALDQHNLKQNDQPMDILQIINCLTTIYDRLEQEHNNLVNVPLCVDMCLNWLLNVYDTGRTGRIRVLSFKTGIISLCKAHLEDKYRYLFKQVASSTGFCDQRRLGLLLHDSIQIPRQLGEVASFGGSNIEPSVRSCFQFANNKPEIEAALFLDWMRLEPQSMVWLPVLHRVAAAETAKHQAKCNICKECPIIGFRYRSLKHFNYDICQSCFFSGRVAKGHKMHYPMVEYCTPTTSGEDVRDFAKVLKNKFRTKRYFAKHPRMGYLPVQTVLEGDNMETPASSPQLSHDDTHSRIEHYASRLAEMENSNGSYLNDSISPNESIDDEHLLIQHYCQSLNQDSPLSQPRSPAQILISLESEERGELERILADLEEENRNLQAEYDRLKQQHEHKGLSPLPSPPEMMPTSPQSPRDAELIAEAKLLRQHKGRLEARMQILEDHNKQLESQLHRLRQLLEQRSDSSQPMLLRVVGSQTSDSMGEEDLLSPPQDTSTGLEEVMEQLNNSFPSSRGRNTPGKPMREDTM

SEQ ID NO: 99991 - protein, 391 aa, Homo sapiens
MWDVAEELKAMLVFAEHRYYGESLPFGDNSFKDSRHLNFLTSEQALADFAELIKHLKRTIPGAENQPVIAIGGSYGGMLAAWFRMKYPHMVVGALAASAPIWQFEDLVPCGVFMKIVTTDFRKSGPHCSESIHRSWDAINRLSNTGSGLQWLTGALHLCSPLTSQDIQHLKDWISETWVNLAMVDYPYASNFLQPLPAWPIKVVCQYLKNPNVSDSLLLQNIFQALNVYYNYSGQVKCLNISETATSSLGTLGWSYQACTEVVMPFCTNGVDDMFEPHSWNLKELSDDCFQQWGVRPRPSWITTMYGGKNISSHTNIVFSNGELDPWSGGGVTKDITDTLVAVTISEGAHHLDLRTKNALDPMSVLLARSLEVRHMKNWIRDFYDSAGKQH

SEQ ID NO: 99992 - protein, 100 aa, Homo sapiens
MRQAGRYLPEFRETRAAQDFFSTCRSPEACCELTLQPLRRFPLDAAIIFSDILVVPQMFSPPPGTGHGGDHGTWQRTQLPRAIKRRAGPRTPTGSRSGSL

SEQ ID NO: 99993 - protein, 55 aa, Homo sapiens
MNAMLETPELPAVFDGVKLAAVAAVLYVIVRCLNLKSPTAPPDLYFQDSGLSRFL

SEQ ID NO: 99994 - protein, 541 aa, Homo sapiens
MAGDLSAGFFMEELNTYRQKQGVVLKYQELPNSGPPHDRRFTFQVIIDGREFPEGEGRSKKEAKNAAAKLAVEILNKEKKAVSPLLLTTTNSSEGLSMGNYIGLINRIAQKKRLTVNYEQCASGVHGPEGFHYKCKMGQKEYSIGTGSTKQEAKQLAAKLAYLQILSEETSVKSDYLSSGSFATTCESQSNSLVTSTLASESSSEGDFSADTSEINSNSDSLNSSSLLMNGLRNNQRKAKRSLAPRFDLPDMKETKYTVDKRFGMDFKEIELIGSGGFGQVFKAKHRIDGKTYVIKRVKYNNEKAEREVKALAKLDHVNIVHYNGCWDGFDYDPETSDDSLESSDYDPENSKNSSRSKTKCLFIQMEFCDKGTLEQWIEKRRGEKLDKVLALELFEQITKGVDYIHSKKLIHRDLKPSNIFLVDTKQVKIGDFGLVTSLKNDGKRTRSKGTLRYMSPEQISSQDYGKEVDLYALGLILAELLHFFTDLRDGIISDIFDKKEKTLLQKLLSKKPEDRPNTSEILRTLTVWKKSPEKNERHTC

SEQ ID NO: 99995 - protein, 80 aa, Homo sapiens
MYEIYVETCGQNTENQVNPATFGKLVRLVFPDLGTRRLGTRGSARYHYDGICIKKSSFFYAQYCYLIGEKRYHSVKIIHR

SEQ ID NO: 99996 - protein, 133 aa, Homo sapiens
MAKFVIAGRADCPYYAKTELVADYLQKNLPDFRIHKITQRPEVWEDWLKDVCEKNKWSHKNSPIIWRELLDRGGKGLLLGGYNEFLEHAQLYYDVTSSMTTELMMVIAQENLGAHIEKEQEEEALKTCINPLQ

SEQ ID NO: 99997 - protein, 119 aa, Homo sapiens
LSKKPLEEKPSQPYSARESLSEVQSLSSFQSESCDDNASIVTVMHLVNAVVDTVSTEESLAAPDLSKPRGYHWDTSDWMPSVPLPDIQEFPNYEVIDEQTPLYSADPNAIDTDYYPGGY

SEQ ID NO: 99998 - protein, 125 aa, Homo sapiens
MLRRGHLAFRDVAIEFPQEEWKCLDPAQRTLYREVMVENYRNLVFLGICLPDLSVISMLEQRRDPRNLQSEVKIANNPGGRECIKGVNAESRSVTQAGVQCRDLGSLQPSLPGFKQFFCIGLPKC

SEQ ID NO: 99999 - protein, 230 aa, Homo sapiens
MELLIMAYALKTACARNIIGVIPYFPYSKQSKMRKRGSIVCKLLASMLAKAGLTHIITMDLHQKEIQGFFSFPVDNLRASPFLLQYIQEEIPNYRNAVIVAKSPDAAKRAQSYAERLRLGLAVIHGEAQCTELDMDDGRHSPPMVKNATVHPGLELPLMMAKEKPPITVVGDVGGRIAIIVDDIIDDVESFVAAAEILKERGAYKIYVMATHGILSAEAPRLIEESSVDE

SEQ ID NO: 100000 - protein, 393 aa, Homo sapiens
MIDVSYSNIKNGLVKLICEELKTMLEKIPKEEQEETSAIRVGFITYNKVLHFFNVKSNLAQPQMMVVTDVGEVFVPLLDGFLVNYQESQSVIHNLLDQIPDMFADSNENETVFAPVIQAGMEALKAADCPGKLFIFHSSLPTAEAPGKLKNRDDKKLVNTDKEKILFQPQTNVYDSLAKDCVAHGCSVTLFLFPSQYVDVASLGLVPQLTGGTLYKYNNFQMHLDRQQFLNDLRNDIEKKIGFDAIMRVRTSTGFRATDFFGGILMNNTTDVEMAAIDCDKAVTVEFKHDDKLSEDSGALIQCAVLYTTISGQRRLRIHNLGLNCSSQLADLYKSCETDALINFFAKSAFKAVLHQPLKVIREILVNQTAHMLACYRKNCASPSAASQFTCEK

SEQ ID NO: 100001 - protein, 105 aa, Homo sapiens
MSRRKQTNPNKVHWDQVFAGLEEQARQAMMKTDFPGDLGSQRQAIQQLRDQDSSSSDSEGDEEETTQDEVSSHTSEEDGGVVKVEKELENTEQPVGGNEVVEHEA

SEQ ID NO: 100002 - protein, 961 aa, Homo sapiens
MKGLSGSRTQPPLCSGHTCGLAPPEDCEHLHHGPDARPPYLLSPADSCPGGRHRCSPRSSVHSECVMMPVVLGDHVSSSTFPRMHYSSHYDTRDDCAVAHAGAKINRIPANLLDQFEKQLPLHRDGFHTLQYQRTSAAAEQRSESPGRIRHLVHSVQKLFTKSHSLEGSSKSNANGTKADGRADDHHHAHHAKHSKRSKSKERKPEGKPRPGMSSWWSSDDNLDSDSTYRTPSVLNRHHLGPVAHCYPDALQSPFGDLSLKTSKSNNDVKCSACEGLALTPDAKYLKRSSWSTLTVSQAKEAYRKSSLNLDKPLLHQDAKPALRPCHYLQVPQDEWGGYPTGGKDEEIPCRRMRSGSYIKAMGDEESGESDSSPKTSPKSAILPEPLLKSIGQRPLGEHQTQTYLQAASDVPVGHSLDPAANYNSPKFRSRNQSYMRAVSTLSQASCVSQVSEAEINGQFESVCESVFSEVESQAMDALDLPGCFRTRSHSYLRAIQAGYSQDDECIPMMTPSDITSTIRSTAAVSYTNYKKTPPPVPPRTTSKPLISVTAQSSTESTQDAYQDSRAQRMSPWPQDSRGLYNSTDSLDSNKAMNLALETAAAQRHLPESQSSSVRTSDKAILVSKAEELLKSRCSSIGIQVETATDSDTESRGLREYHSVGVQVEDEKRHGRFKRSNSVTAAVQADLELEGFPGHITTEDKGLQFGSSFQRHSEPSTPTQYSAVRTVRTQGLFSYREDYRTQVDTSTLPPPDPWLEPAIDTVETGRMSPCRRDGSWFLKLLHAETKRMEGWCKEMEREAEENDLSEEILGKIRSAVGSAQLLMSQKFQQFYWLCQQNMDPSAMPRPTSQDLAGYWDMLQLSIEDVSMKFDELQRLRLNDWKMMESPERKEERKVPPPIPKKPPKGKFPITREKSLDLPDRQRQEARRRLMAAKRAASFRQNSASERADSIEIYIPEAQTRL

SEQ ID NO: 100003 - protein, 211 aa, Homo sapiens
MQEIIASVDHIKFDLEIAVEQQLGAQPLPFPGMDKSGAAVCEFFLKAACGKGGMCPFRHISGEKTVVCKHWLRGLCKKGDQCEFLHEYDMTKMPECYFYSKFGPLCRHRHTRRVICVNYLVGFCPEGPSCKFMHPRFELPMGTTEQPPLPQQTQPPAKRTPQVIGVMQSQNSSAGNRGPRPLEQVTCYKCGEKGHYANRCTKGHLAFLSGQ

SEQ ID NO: 100004 - protein, 71 aa, Homo sapiens
MLQQVPENINFPAEEEKILEFWTEFNCFQECLKQSKHKPKNMKLIRHWESEDQRMWPKWGLQSITISAEQL

SEQ ID NO: 100005 - protein, 133 aa, Homo sapiens
MGIKVQRPRCFFDIAINNQPAGRVVFELFSDVCPKTCENFRCLCTGEKGTGKSTQKPLHYKSCLFHRVVKDFMVQGGDFSEGNGRGGESIYGGFFEDESFAVKHNKEFLLSMANRGKDTNGSQFFIDANFVFL

SEQ ID NO: 100006 - protein, 65 aa, Homo sapiens
MLQQVNGHNPGSDGQAREYLREDLQEFLGGEVLLYKLDDLTRVNPVTLETVLRCLQARYMADTFY

SEQ ID NO: 100007 - protein, 138 aa, Homo sapiens
MGGFRTEGMFVSLQEPSLYTVKAILILDNDGDRLFAKYYDDTYPSVKEQKAFEKNIFNKTHRTDSEIALLEGLTVVYKSSIDLYFYVIGSSYENELMLMAVLNCLFDSLSQMLRKNVEKRALLENMEGLFLAVDEIVD

SEQ ID NO: 100008 - protein, 39 aa, Homo sapiens
MEASSEPPLDAKSDVSSNLEGEFSVETGYGCELRHLQIS

SEQ ID NO: 100009 - protein, 2608 aa, Homo sapiens
MDGRDFAPPPHLLSERGSLGHRSAAAAARLAPAGPAAQPPAHFQPGKYFPSPLPMASHTASSRLMGSSPASSFMGSFLTSSLGSAASTHPSGPSSSPPEQAYRGSHPTTSQIWFSHSHEAPGYPRFSGSLASTFLPVSHLDHHGNSNVLYGQHRFYGTQKDNFYLRNLPPQPTLLPANHNFPSVARAAPAHPMGSCSRDRDRGEAGSLQKGPKDFDRFLVGKELGREKAGKAAEGKERPAAEEDGGKERHKLVLPVPADGHCREGGPAPRGACEGRPKHLTSCLLNTKVLNGEMGRAALASCAGGMLGRPGTGVVTSGRCAKEAAGPPEPGPAFSECLERRQMLHHTASYAGPPPPLSTAAGSFPCLQLHGGPDGLCPLQDKAPRDLKASGPTFVPSVGHLADKGRPFQAAEACAVAGEGKDRHLEGTMAPDHAAPYGVSYAHLKAEGKGERRPGGFEAALNPRLKGLDYLSSAGPEASFPGLPKSGLDKSGYFELPTSSQDCARPGHQDPLGGKAPQACCTLDKTVGKEAPAGPPGAQKVARIRHQQHLMAAEVEQGGIGAEAKRKSLELASLGYSGPHLPPWGVQAGQGTAMAISEERKAGAYLDPFGSGLQQAALLPQELPAPPDEVSAMKNLLKYSSQALVVGQKAPLVGLGGLKASCIQQEAKFLSSKGPGQSERPDCARSREHDTTHGDGEVRQPPVGIAVALARQKDTVSRSEAAYGTNTARQGRAAPAFKGGGGPRSTHALDLEAEEERTRLCDDRLGLASRELLLQDSKDRVEFARIHPPSSCPGDLAPHLMMQSGQLGGDPAPHTHPHPPWLPRTRSPSLWMGGHSYGLGHPALHQNLPPGFPASVAGPVPSVFPLPQDAPTQLVILPSEPTPHSAPHALADVMDQASLWPPMYGGRGPASHMQHPGQLPVYSRPQLLRQQELYALQQQRAAQFQRKPEDQHLDLEEPAQEKAPKSTHKPVALTPTAPGAPSPAAGPTKLPPCCHPPDPKPPASSPTPPPRPSAPCTLNVCPASSPGPGSRVRSAEEKNGEGQQSTADIITSEPDLPPGYLRPMAGLGFSLPSDVHSSNLEDPETMQTTAPGAQPEPTRTFLPGEPPPCSPRSLEEPGLLSGAREATQDLAATPYPTERGPQGKAADPSPLEGLQELQCAALLEAGGPEATGQAHSTQGGAREERSREEGEQGPSSGASSQVLEQRAGSPGALEDEGEQPAPEEDELEEDELGQQSMEDSEEDCGGAPDNSHPPRALPGLDALVAATINLGDLPSDSPPDPQPPAASGPPSTVPLPHSSGIHGIALLSELADLAIQRQRSERTVPEEEEDVLAFNLQHLATLATAWSLVEAAGLDSSTAPAQPPTANPCSGPRLTPRMQILQRKDTWTPKTKPVCPLKAAIDRLDTQEVGMRVRLAELQRRYKEKQRELARLQRKHDHERDESSRSPARRGPGRPRKRKHSSSLPAPRPTGPLPRSDGKKVKAVRTSLGLLCAELRGGSGGEPAKKRSKLERSVYAGLQTASVEKAQCKKSSCQGGLAPSVAHRVAQLKPKVKSKGLPTGLSSFQQKEATPGGRIREKLSRAKSAKVSGATRHPQPKGHGSRETPRCPAQPSVAASQEAGSGYDSEDCEGLLGTEAPPREAGLLLHTGASVAVLGPSPSSVVKMEANQKAKKKKERQGLLGACRLSSPESEVKIKRRSVKAKVGTTLERAPGQRPPGALGKKKAKGKAKGSLRAEPGATPSRDALFNPSRAFACREEGSQLASERLKRATRKGTVLQPVLRRKNGALSITLATRNAKAILGKGRKLSKVKHKAGKQGKGRAVSRLLESFAVEEDFEFDDNSSFSEEEEDEEEEEEDSGPLSAEQSAALARSCAIHKEDLRDGLPVLIPKEDSLLYAGSVRTLQPPDIYSIVIEGERGNRQRIYSLEQLLQEAVLDVRPQSSRYLPPGTRVCAYWSQKSRCLYPGNVVRGASGDEDEDLDSVVVEFDDGDTGHIAVSNVRLLPPDFKIQCTEPSPALLVSSSCRRTKKVSSEAPPPSEAATPSLSPKAQDGPEALKTPGKKSISKDKAGKAELLTSGAKSPTGASDHFLGRRGSPLLSWSAVAQTKRKAVAAASKGPGVLQNLFQLNGSSKKLRAREALFPVHSVATPIFGNGFRADSFSSLASSYAPFVGGTGPGLPRGAHKLLRAKKAERVEAEKGGRRRAGGEFLVKLDHEGVTSPKNKTCKALLMGDKDFSPKLGRPLPSPSYVHPALVGKDKKGRAPIPPLPMGLALRKYAGQAEFPLPYDSDCHSSFSDEDEDGPGLAAGVPSRFLARLSVSSSSSGSSTSSSSGSVSTSSLCSSDNEDSSYSSDDEDPALLLQTCLTHPVPTLLAQPEALRSKGSGPHAHAQRCFLSRATVAGTGAGSGPSSSSKSKLKRKEALSFSKAKELSRRQRPPSVENRPKISAFLPARQLWKWSGNPTQRRGMKGKARKLFYKAIVRGEETLRVGDCAVFLSAGRPNLPYIGRIESMWESWGSNMVVKVKWFYHPEETKLGKRQCDGKNALYQSCHEDENDVQTISHKCQVVAREQYEQMARSRKCQDRQDLYYLAGTYDPTTGRLVTADGVPILC

SEQ ID NO: 100010 - protein, 201 aa, Homo sapiens
MELLTFRDVAIEFSPEEWKCLDPDQQNLYRDVMLENYRNLVSLGVAISNPDLVTCLEQRKEPYNVKIHKIVARPPAMCSHFTQDHWPVQGIEDSFHKLILRRYEKCGHDNLQLRKGCKSLNECKLQKGGYNEFNECLSTTQSKILQCKASVKVVSKFSNSNKRKTRHTGEKHFKECGKSFQKFSHLTQHKNSSISMTTSPF

SEQ ID NO: 100011 - protein, 63 aa, Homo sapiens
MEAGGFLDSLIYGACVVFTLGMFSAGLSDLRHMRMTRSVDNVQFLPFLTTEVNVLCSYRLQPC

SEQ ID NO: 100012 - protein, 251 aa, Homo sapiens
MLYAATRATVKKEFGGGHIKDELFGTVKDDLSFAGYQKHLSSCAAPAPLTSAERELQQIRINEVKTEISVESKHQTLQGLAFPLQPEAQRALQQLKQKMVNYIQMKLDLERETIELVHTEPTDVAQLPSRVPRDAARYHFFLYKHTHEGDPLESVVFIYSMPGYKCSIKERMLYSSCKSRLLDSVEQDFHLEIAKKIEIGDGAELTAEFLYDEVHPKQHAFKQAFAKPKGPGGKRGHKRLIRGPGENGDDS

SEQ ID NO: 100013 - protein, 156 aa, Homo sapiens
MQIFVKTLMGKTITLEVELSDTIDNVKAKIQDKEGIPPDQQRLIFAGKQLEDGRTLSDYNIQKESTLHLVLRLRGGAKKRKKKSYTTPRKNKHKRKKVKLALLKYYKVDENGKISCLHRECPSDECGAGVFMASHFDRHYCGKCCLTYCFNKPEDK

SEQ ID NO: 100014 - protein, 40 aa, Homo sapiens
MSRYLRPPNTSLFVRNVADDTSTKSDESQGREECVQFFTL

SEQ ID NO: 100015 - protein, 123 aa, Homo sapiens
LVNYQISVKCSNQFKLEVCLLKSENKVVDNQAGTQGQLKVLGANLWWPYLMHEHPAYLYSWEDGDCSHQSLGPLPACDLCDQLHLRSRQGGSVCGCDPCEQLLLLVSQLRAPGVDSAAAGRPV

SEQ ID NO: 100016 - protein, 331 aa, Homo sapiens
MAWNTNLRWRLPLTCLLLQVIMVILFGVFVRYDFEADAHWWSERTHKNLSDMENEFYYRYPSFQDVHVMVFVGFGFLMTFLQRYGFSAVGFNFLLAAFGIQWALLMQGWFHFLQDRYIVVGVENLINADFCVASVCVAFGAVLGKVSPIQLLIMTFFQVTLFAVNEFILLNLLKVKDAGGSMTIHTFGAYFGLTVTRILYRRNLEQSKERQNSVYQSDLFAMIGTLFLWMYWPSFNSAISYHGDSQHRAAINTYCSLAACVLTSVAISSALHKKGKLDMVHIQNATLAGGVAVGTAAEMMLMPYGALIIGFVCGIISTLGFVYLTAASWVL

SEQ ID NO: 100017 - protein, 40 aa, Homo sapiens
MSTVEEDSDTVTVETVNSVTLTQDTEGNLILHCPQNEADE

SEQ ID NO: 100018 - protein, 246 aa, Homo sapiens
ATGSSVEYRCNEYYLLRGSKISRCEQGKWSSPPVCLEPCTVNVDYMNRNNIEMKWKYEGKVLHGDLIDFVCKQGYDLSPLTPLSELSVQCNRGEVKYPLCTRKESKGMCTSPPLIKHGVIISSTVDTYENGSSVEYRCFDHHFLEGSREAYCLDGMWTTPPLCLEPCTLSFTEMEKNNLLLKWDFDNRPHILHGEYIEFICRGDTYPAELYITGSILRMQCDRGQLKYPRCIPRQSTLSYQEPLRT

SEQ ID NO: 100019 - protein, 1569 aa, Homo sapiens
MYVRVSFDTKPDLLLHLMTKEWQLELPKLLISVHGGLQNFELQPKLKQVFGKGLIKAAMTTGAWIFTGGVNTGVIRHVGDALKDHASKSRGKICTIGIAPWGIVENQEDLIGRDVVRPYQTMSNPMSKLTVLNSMHSHFILADNGTTGKYGAEVKLRRQLEKHISLQKINTRCLPFFSLDSRLFYSFWGSCQLDSVGIGQGVPVVALIVEGGPNVISIVLEYLRDTPPVPVVVCDGSGRASDILAFGHKYSEEGGLINESLRDQLLVTIQKTFTYTRTQAQHLFIILMECMKKKELITVFRMGSEGHQDIDLAILTALLKGANASAPDQLSLALAWNRVDIARSQIFIYGQQWPVGSLEQAMLDALVLDRVDFVKLLIENGVSMHRFLTISRLEELYNTRHGPSNTLYHLVRDVKKGNLPPDYRISLIDIGLVIEYLMGGAYRCNYTRKRFRTLYHNLFGPKRDDIPLRRGRKTTKKREEEVDIDLDDPEINHFPFPFHELMVWAVLMKRQKMALFFWQHGEEAMAKALVACKLCKAMAHEASENDMVDDISQELNHNSRDFGQLAVELLDQSYKQDEQLAMKLLTYELKNWSNATCLQLAVAAKHRDFIAHTCSQMLLTDMWMGRLRMRKNSGLKVILGILLPPSILSLEFKNKDDMPYMSQAQEIHLQEKEAEEPEKPTKEKEEEDMELTAMLGRNNGESSRKKDEEEVQSKHRLIPLGRKIYEFYNAPIVKFWFYTLAYIGYLMLFNYIVLVKMERWPSTQEWIVISYIFTLGIEKMREILMSEPGKLLQKVKVWLQEYWNVTDLIAILLFSVGMILRLQDQPFRSDGRVIYCVNIIYWYIRLLDIFGVNKYLGPYVMMIGKMMIDMMYFVIIMLVVLMSFGVARQAILFPNEEPSWKLAKNIFYMPYWMIYGEVFADQIDPPCGQNETREDGKIIQLPPCKTGAWIVPAIMACYLLVANILLVNLLIAVFNNTFFEVKSISNQVWKFQRYQLIMTFHERPVLPPPLIIFSHMTMIFQHLCCRWRKHESDPDERDYGLKLFITDDELKKVHDFEEQCIEEYFREKDDRFNSSNDERIRVTSERVENMSMRLEEVNEREHSMKASLQTVDIRLAQLEDLIGRMATALERLTGLERAESNKIRSRTSSDCTDAAYIVRQSSFNSQEGNTFKLQESIDPAGEETMSPTSPTLMPRMRSHSFYSVNMKDKGGIEKLESIFKERSLSLHRATSSHSVAKEPKAPAAPANTLAIVPDSRRPSSCIDIYVSAMDELHCDIDPLDNSVNILGLGEPSFSTPVPSTAPSSSAYATLAPTDRPPSRSIDFEDITSMDTRSFSSDYTHLPECQNPWDSEPPMYHTIERSKSSRYLATTPFLLEEAPIVKSHSFMFSPSRSYYANFGVPVKTAEYTSITDCIDTRCVNAPQAIADRAAFPGGLGDKVEDLTCCHPEREAELSHPSSDSEENEAKGRRATIAISSQEGDNSERTLSNNITVPKIERANSYSAEEPSAPYAHTRKSFSISDKLDRQRNTASLRNPFQRSKSSKPEGRGDSLSMRRLSRTSAFQSFESKHN

SEQ ID NO: 100020 - protein, 219 aa, Homo sapiens
MNRFRVSKFRHTEARPPRRESWISDIRAGTAPSCRNHIKSSCSLIAFNSDRPGVLGIVPLQGQGEDKRRVAHLGCHSDLVTDLDFSPFDDFLLATGSADRTVKLWRLPGPGQALPSAPGVVLGPEDLPVEVLQFHPTSDGILSWQPMGTWCRAPSGAEMEPWWARRARTSSCGSLTPEQSRGPLRARRPMRTAGIAGWHGWAPGSTLCLLDSTRCVSAK

SEQ ID NO: 100021 - protein, 1419 aa, Homo sapiens
  MOD_RES (1)..(1): Any amino acid
XMTQLTVEKVMDWYQTRAEEIEHYARQLQQKIIPDQDQLMAIALECIYTCERNDQLCLCYDLLECLPERGYGDKTEATTKLHDMVDQLEQILSVSELLEKHGLEKPISFVKNTQSSSEEARKLMVRLTRHTGRKQPPVSESHWRTLLQDMLTMQQNVYTCLDSDACYEIFTESLLCSSRLENIHLAGQMMHCSACSENPPAGIAHKGKPHYRVSYEKSIDLVLAASREYFNSSTNLTDSCMDLARCCLQLITDRPPAIQEELDLIQAVGCLEEFGVKILPLQVRLCPDRISLIKECISQSPTCYKQSTKLLGLAELLRVAGENPEERRGQVLILLVEQALRFHDYKAASMHCQELMATGYPKSWDVCSQLGQSEGYQDLATRQELMAFALTHCPPSSIELLLAASSSLQTEILYQRVNFQIHHEGGENISASPLTSKAVQEDEVGVPGSNSADLLRWTTATTMKVLSNTTTTTKAVLQAVSDGQWWKKSLTYLRPLQGQKCGGAYQIGTTANEDLEKQGCHPFYESVISNPFVAESEGTYDTYQHVPVESFAEVLLRTGKLAEAKNKGEVFPTTEVLLQLASEALPNDMTLALAYLLALPQVLDANRCFEKQSPSALSLQLAAYYYSLQIYARLAPCFRDKCHPLYRADPKELIKMVTRHVTRHEHEAWPEDLISLTKQLHCYNERLLDFTQAQILQGLRKGVDVQRFTADDQYKRETILGLAETLEESVYSIAISLAQRYSVSRWEVFMTHLEFLFTDSGLSTLEIENRAQDLHLFETLKTDPEAFHQHMVKYIYPTIGGFDHERLQYYFTLLENCGCADLGNCAIKPETHIRLLKKFKVVASGLNYKKLTDENMSPLEALEPVLSSQNILSISKLVPKIPEKDGQMLSPSSLYTIWLQKLFWTGDPHLIKQVPGSSPEWLHAYDVCMKYFDRLHPGDLITVVDAVTFSPKAVTKLSVEARKEMTRKAIKTVKHFIEKPRKRNSEDEAQEAKDSKVTYADTLNHLEKSLAHLETLSHSFILSLKNSEQETLQKYSHLYDLSRSEKEKLHDEAVAICLDGQPLAMIQQLLEVAVGPLDISPKDIVQSAIMKIISALSGGSADLGGPRDPLKVLEGVVAAVHASVDKGEELVSPEDLLEWLRPFCADDAWPVRPRIHVLQILGQSFHLTEEDSKLLVFFRTEAILKASWPQRQVDIADIENEENRYCLFMELLESSHHEAEFQHLVLLLQAWPPMKSEYVITNNPWVRLATVMLTRCTMENKEGLGNEVLKMCRSLYNTKQMLPAEGVKELCLLLLNQSLLLPSLKLLLESRDEHLHEMALEQITAVTTVNDSNCDQELLSLLLDAKLLVKCVSTPFYPRIVDHLLASLQQGRWDAEELGRHLREAGHEAEAGSLLLAVRGTHQAFRTFSTALRAAQHWV

SEQ ID NO: 100022 - protein, 87 aa, Homo sapiens
MQLFVRAQELHTFEVTGQETVAQIKAHVASLEGIAPEDQVVLLAGAPLEDEATLGQCGVEALTTLEVAGRMLGGGQTGEEEEEDRSG

SEQ ID NO: 100023 - protein, 334 aa, Homo sapiens
MAYHSFLVEPISCHAWNKDRTQIAICPNNHEVHIYEKSGAKWTKVHELKEHNGQVTGIDWAPESNRIVTCGTDRNAYVWTLKGRTWKPTLVILRINRAARCVRWAPNENKFAVGSGSRVISICYFEQENDWWVCKHIKKPIRSTVLSLDWHPNNVLLAAGSCDFKCRIFSAYIKEVEERPAPTPWGSKMPFGELMFESSSSCGWVHGVCFSASGSRVAWVSHDSTVCLADADKKMAVATLASETLPLLALTFITDNSLVAAGHDCFPVLFTYDAAAGMLSFGGRLDVPKQSSQRGLTARERFQNLDKKASSEGGTAAGAGLDSLHKNSVSQISV

SEQ ID NO: 100024 - protein, 695 aa, Homo sapiens
MASTRSIELEHFEERDKRPRPGSRRGAPSSSGGSSSSGPKGNGLIPSPAHSAHCSFYRTRTLQALSSEKKAKKARFYRNGDRYFKGLVFAISSDRFRSFDALLIELTRSLSDNVNLPQGVRTIYTIDGSRKVTSLDELLEGESYVCASNEPFRKVDYTKNINPNWSVNIKGGTSRALAAASSVKSEVKESKDFIKPKLVTVIRSGVKPRKAVRILLNKKTAHSFEQVLTDITEAIKLDSGVVKRLCTLDGKQVTCLQDFFGDDDVFIACGPEKFRYAQDDFVLDHSECRVLKSSYSRSSAVKYSGSKSPGPSRRSKSPASVNGTPSSQLSTPKSTKSSSSSPTSPGSFRGLKISAHGRSSSNVNGGPELDRCISPEGVNGNRCSESSTLLEKYKIGKVIGDGNFAVVKECIDRSTGKEFALKIIDKAKCCGKEHLIENEVSILRRVKHPNIIMLVEEMETATELFLVMELVKGGDLFDAITSSTKYTERDGSAMVYNLANALRYLHGLSIVHRDIKPENLLVCEYPDGTKSLKLGDFGLATVVEGPLYTVCGTPTYVAPEIIAETGYGLKVDIWAAGVITYILLCGFPPFRSENNLQEDLFDQILAGKLEFPAPYWDNITDSAKELISQMLQVNVEARCTAGQILSHPWVSDDASQENNMQAEVTGKLKQHFNNALPKQNSTTTGVSVIMFDLTV

SEQ ID NO: 100025 - protein, 138 aa, Homo sapiens
MVLLHVKRGDESQFLLQAPGSTELEELTVQVARVYNGRLKVQRLCSEMEELAEHGIFLPPNMQGLTDDQIEELKLKDEWGEKCVPSGGAVFKKDDIGRRNGQETSGSRCLCYHGDGERCLGPASRRGDDCLPHGVATV

SEQ ID NO: 100026 - protein, 479 aa, Homo sapiens
MLRRALLCLAVAALVRADAPEEEDHVLVLRKSNFAEALAAHKYLLVEFYAPWCGHCKALAPEYAKAAGKLKAEGSEIRLAKVDATEESDLAQQYGVRGYPTIKFFRNGDTASPKEYTAGREADDIVNWLKKRTGPAATTLPDGAAAESLVESSEVAVIGFFKDVESDSAKQFLQAAEAIDDIPFGITSNSDVFSKYQLDKDGVVLFKKFDEGRNNFEGEVTKENLLDFIKHNQLPLVIEFTEQTAPKIFGGEIKTHILLFLPKSVSDYDGKLSNFKTAAESFKGKILFIFIDSDHTDNQRILEFFGLKKEECPAVRLITLEEEMTKYKPESEELTAERITEFCHRFLEGKIKPHLMSQELPEDWDKQPVKVLVGKNFEDVAFDEKKNVFVEFYAPWCGHCKQLAPIWDKLGETYKDHENIVIAKMDSTANEVEAVKVHSFPTLKFFPASADRTDLEDLEEAEEPDMEEDDDQKAVKDEL

SEQ ID NO: 100027 - protein, 375 aa, Homo sapiens
  MOD_RES (1)..(1): Any amino acid
XAINIGLTVLPPPRTIKIAILNFDEYALNKEGIEKILTMIPTDEEKQKIQEAQLANPEIPLGSAEQFLLTLSSISELSARLHLWAFKMDYETTEKEVAEPLLDLKEGIDQLENNKTLGFILSTLLAIGNFLNGTNAKAFELSYLEKVPEVKDTVHKQSLLHHVCTMVVENFPDSSDLYSEIGAITRSAKVDFDQLQDNLCQMERRCKASWDHLKAIAKHEMKPVLKQRMSEFLKDCAERIIILKIVHRRIINRFHSFLLFMGHPPYAIREVNINKFCRIISEFALEYRTTRERVLQQKQKRANHRERNKTRGKMITDDPLVPGLWELMTRPMSQMMQLMRSWTASSSQPPKCPVSEWCRGRGNDPGPTGNLCEEP

SEQ ID NO: 100028 - protein, 204 aa, Homo sapiens
MARACLQAVKYLMFAFNLLFWLGGCGVLGVGIWLAATQGSFATLSSSFPSLSAANLLIITGAFVMAIGFVGCLGAIKENKCLLLTFFLLLLLVFLLEATIAILFFAYTDKFRCCGVSNYTDWFEVYNATRVPDSCCLEFSESCGLHAPGTWWKAPCYETVKVWLQENLLAVGIFGLCTALVQILGLTFAMTMYCQVVKADTYCA

SEQ ID NO: 100029 - protein, 343 aa, Homo sapiens
MLKPSLPFTSLLFLQLPLLGVGLNTTILTPNGNEDTTADFFLTTMPTDSLSVSTLPLPEVQCFVFNVEYMNCTWNSSSEPQPTNLTLHYWYKNSDNDKVQKCSHYLFSEEITSGCQLQKKEIHLYQTFVVQLQDPREPRRQATQMLKLQNLVIPWAPENLTLHKLSESQLELNWNNRFLNHCLEHLVQYRTDWDHSWTEQSVDYRHKFSLPSVDGQKRYTFRVRSRFNPLCGSAQHWSEWSHPIHWGSNTSKENPFLFALEAVVISVGSMGLIISLLCVYFWLERTMPRIPTLKNLEDLVTEYHGNFSSQAPPLGILVIHNYQQLSPACPAWASSAYEIHLPL

SEQ ID NO: 100030 - protein, 185 aa, Homo sapiens
  MOD_RES (1)..(1): Any amino acid
XESKEEAIRTLQRKICELQARLQAQEEQHQEVQKAKEADIEKLNQALCLRYKNEKELQEVIQQQNEKILEQIDKSGELISLREEVTHLTRSLRRAETETKVLQEALAGQLDSNCQPMATNWIQEKVWLSQEVDKLRVMFLEMKNEKEKLMIKFQSHRNILEENLRRSDKELEKLDDIVQHIYKRW

SEQ ID NO: 100031 - protein, 81 aa, Homo sapiens
MDNITRQNQFYDTQVIKQENESGYERRPLEMEQQQAYRPEMKTEMKQGAPTSFLPPEASQLKPDRQQFQSRKRPYEENRGR

SEQ ID NO: 100032 - protein, 386 aa, Homo sapiens
MTLNMKETRWGAPAPEIPLCAGCDQHILDRFILKALDRHWHSKCLKCSDCHTPLAERCFSRGESVYCKDDFFKRFGTKCAACQLGIPPTQVVRRAQDFVYHLHCFACVVCKRQLATGDEFYLMEDSRLVCKADYETAKQREAEATAKRPRTTITAKQLETLKSAYNTSPKPARHVREQLSSETGLDMRVVQVWFQNRRAKEKRLKKDAGRQRWGQYFRNMKRSRGGSKSDKDSVQEGQDSDAEVSFPDEPSLAEMGPANGLYGSLGEPTQALGRPSGALGNFSLEHGGLAGPEQYRELRPGSPYGVPPSPAAPQSLPGPQPLLSSLVYPDTSLGLVPSGAPGGPPPMRVLAGNGPSSDLSTGSSGGYPDFPASPASWLDEVDHAQF

SEQ ID NO: 100033 - protein, 764 aa, Homo sapiens
MSQRPRAPRSALWLLAPPLLRWAPPLLTVLHSDLFQALLDILDYYEASLSESQKYRYQDEDTPPLEHSPAHLPNQANSPPVIVNTDTLEAPGYVNGTEGEMEYEEITLERGNSGLGFSIAGGTDNPHIGDDPSIFITKIIPGGAAAQDGRLRVNDSILFVNEVDVREVTHSAAVEALKEAGSIVRLYVMRRKPPAEKVMEIKLIKGPKGLGFSIAGGVGNQHIPGDNSIYVTKIIEGGAAHKDGRLQIGDKILAVNSVGLEDVMHEDAVAALKNTYDVVYLKVAKPSNAYLSDSYAPPDITTSYSQHLDNEISHSSYLGTDYPTAMTPTSPRRYSPVAKDLLGEEDIPREPRRIVIHRGSTGLGFNIVGGEDGEGIFISFILAGGPADLSGELRKGDQILSVNGVDLRNASHEQAAIALKNAGQTVTIIAQYKPEEYSRFEAKIHDLREQLMNSSLGSGTASLRSNPKRGFYIRALFDYDKTKDCGFLSQALSFRFGDVLHVIDASDEEWWQARRVHSDSETDDIGFIPSKRRVERREWSRLKAKDWGSSSGSQGREDSVLSYETVTQMEVHYARPIIILGPTKDRANDDLLSEFPDKFGSCVPHTTRPKREYEIDGRDYHFVSSREKMEKDIQAHKFIEAGQYNSHLYGTSVQSVREVAEQGKHCILDVSANAVRRLQAAHLHPIAIFIRPRSLENVLEINKRITEEQARKAFDRATKLEQEFTECFSAIVEGDSFEEIYHKVKRVIEDLSGPYIWVPARERL

SEQ ID NO: 100034 - protein, 394 aa, Homo sapiens
MPRVKAAQAGRQSSAKRHLAEQFAVGEIITDMAKKEWKVGLPIGQGGFGCIYLADMNSSESVGSDAPCVVKVEPSDNGPLFTELKFYQRAAKPEQIQKWIRTRKLKYLGVPKYWGSGLHDKNGKSYRFMIMDRFGSDLQKIYEANAKRFSRKTVLQLSLRILDILEYIHEHEYVHGDIKASNLLLNYKNPDQVYLVDYGLAYRYCPEGVHKEYKEDPKRCHDGTIEFTSIDAHNAPSRRGDLEILGYCMIQWLTGHLPWEDNLKDPKYVRDSKIRYRENIASLMDKCFPEKNKPGEIAKYMETVKLLDYTEKPLYENLRDILLQGLKAIGSKDDGKLDLSVVENGGLKAKTITKKRKKEIEESKEPGVEDTEWSNTQTEEAIQTRSRTRKRVQK

SEQ ID NO: 100035 - protein, 357 aa, Homo sapiens
MAAGVEAAAEVAATEIKMEEESGAPGVPSGNGAPGPKGEGERPAQNEKRKEKNIKRGGNRFEPYANPTKRYRAFITNIPFDVKWQSLKDLVKEKVGEVTYVELLMDAEGKSRGCAVVEFKMEESMKKAAEVLNKHSLSGRPLKVKEDPDGEHARRAMQKVMATTGGMGMGPGGPGMITIPPSILNNPNIPNEIIHALQAGRLGSTVFVANLDYKVGWKKLKEVFSMAGVVVRADILEDKDGKSRGIGTVTFEQSIEAVQAISMFNGQLLFDRPMHVKMDERALPKGDFFPPERPQQLPQILSNALKRGEIIAKQGGGGGGGSVPGIERMGPGIDRLGGAGMERMGAGLGHGMDRVGS

SEQ ID NO: 100036 - protein, 505 aa, Homo sapiens
MSSEMEPLLLAWSYFRRRKFQLCADLCTQMLEKSPYDQAAWILKARALTEMVYIDEIDVDQEGIAEMMLDENAIAQVPRPGTSLKLPGTNQTGGPSQAVRPITQAGRPITGFLRPSTQSGRPGTMEQAIRTPRTAYTARPITSSSGRFVRLGTASMLTSPDGPFINLSRLNLTKYSQKPKLAKALFEYIFHHENDVKTALDLAALSTEHSQYKDWWWKVQIGKCYYRLGMYREAEKQFKSALKQQEMVDTFLYLAKVYVSLDQPVTALNLFKQGLDKFPGEVTLLCGIARIYEEMNNMSSAAEYYKEVLKQDNTHVEAIACIGSNHFYSDQPEIALRFYRRLLQMGIYNGQLFNNLGLCCFYAQQYDMTLTSFERALSLAENEEEAADVWYNLGHVAVGIGDTNLAHQCFRLALVNNNNHAEAYNNLAVLEMRKGHVEQARALLQTASSLAPHMYEPHFNFATISDKIGDLQRSYVAAQKSEAAFPDHVDTQHLIKQLRQHFAML

SEQ ID NO: 100037 - protein, 52 aa, Homo sapiens
VYLVDYGLAYRYCPEGVHKEYKEDPKRCHDGTIEFTSIDAHNGVDTEKILQV

SEQ ID NO: 100038 - protein, 117 aa, Homo sapiens
GNVTAENIFVDPEDQSQVTLAGYGFAFRYCPSGKHVAYVEGSRSPHEGDLEFISMDLHKGCGPSRRSDLQSLGYCMLKWLYGFLPWTNCLPNTEDIMKQKQKCICTLKIACWPWCCV

SEQ ID NO: 100039 - protein, 27 aa, Homo sapiens
AVAPRAKSVRAKKPIKYLEESDEDDLF

SEQ ID NO: 100040 - protein, 1181 aa, Homo sapiens
MRSRSNSGVRLDGYARLVQQTILCHQNPVTGLLPASYDQKDAWVRDNVYSILAVWGLGLAYRKNADRDEDKAKAYELEQSVVKLMRGLLHCMIRQVDKVESFKYSQSTKDSLHAKYNTKTCATVVGDDQWGHLQLDATSVYLLFLAQMTASGLHIIHSLDEVNFIQNLVFYIEAAYKTADFGIWERGDKTNQGISELNASSVGMAKAALEALDELDLFGVKGGPQSVIHVLADEVQHCQSILNSLLPRASTSKEVDASLLSVVSFPAFAVEDSQLVELTKQEIITKLQGRYGCCRFLRDGYKTPKEDPNRLYYEPAELKLFENIECEWPLFWTYFILDGVFSGNAEQVQEYKEALEAVLIKGKNGVPLLPELYSVPPDRVDEEYQNPHTVDRVPMGKLPHMWGQSLYILGSLMAEGFLAPGEIDPLNRRFSTVPKPDVVVQVSILAETEEIKTILKDKGIYVETIAEVYPIRVQPARILSHIYSSLGCNNRMKLSGRPYRHMGVLGTSKLYDIRKTIFTFTPQFIDQQQFYLALDNKMIVEMLRTDLSYLCSRWRMTGQPTITFPISHSMLDEDGTSLNSSILAALRKMQDGYFGGARVQTGKLSEFLTTSCCTHLSFMDPGPEGKLYSEDYDDNYDYLESGNWMNDYDSTSHDVHMYLPTKLFQASRPSFNLLDSPHPRQENQVPSVRVEIHLPRDQSGEVDFKALVLQLKETSSLQEQADILYMLYTMKGPDWNTELYNERSATVRELLTELYGKVGEIRHWGLIRYISGILRKKVEALDEACTDLLSHQKHLTVGLPPEPREKTISAPLPYEALTQLIDEASEGDMSISILTQEIMVYLAMYMRTQPGLFAEMFRLRIGLIIQVMATELAHSLRCSAEEATEGLMNLSPSAMKNLLHHILSGKEFGVERSVRPTDSNVSPAISIHEIGAVGATKTERTGIMQLKSEIKQVEFRRLSISAESQSNGGHPLGIDLMSPSFMSPGTSMTPSSGSFPSAYDQQSSKDSRQGQWQRRRRLDGALNRVPVGFYQKVWKVLQKCHGLSVEGFVLPSSTTREMTPGEIKFSVHVESVLNRVPQPEYRQLLVEAILVLTMLADIEIHSIGSIIAVEKIVHIANDLFLQEQKTLGADDTMLAKDPASGICTLLYDSAPSGRFGTMTYLSKAAATYVQEFLPHSICAMQ

SEQ ID NO: 100041 - protein, 214 aa, Homo sapiens
  MOD_RES (1)..(1): Any amino acid
XKVNDTAARLSYQKNAGFQEYTIPITVKDRAGQAATKLLRVNLCECTHPTQCRATSRSTGVILGKWAILAILLGIALLFSVLLTLVCGVFGATKGKRFPEDLAQQNLIISNTEAPGDDRVCSANGFMTQTTNNSSQGFCGTMGSGMKNGGQETIEMMKGGNQTLESCRGAGHHHTLDSCRGGHTEVDNCRYTYSEWHSFTQPRLGEESIRGHTG

SEQ ID NO: 100042 - protein, 27 aa, Homo sapiens
MGQLYEDNHEEDYFLYVAYSDESVYGK

SEQ ID NO: 100043 - protein, 176 aa, Homo sapiens
MQIVLGILSAVLGGFFYIRDYTLLVTSGAAIWTGAVAVLAGAAAFIYEKRGGTYWALLRTLLTLAAFSTAIAALKLWNEDFRYGYSYYNSACRISSSSDWNTPAPTQSPEEVRRLHLCTSFMDMLKALFRTLQAMLLGVWILLLLASLTPLWLYCWRMFPTKGKRDQKEMLEVSGI

SEQ ID NO: 100044 - protein, 63 aa, Homo sapiens
MAAPLSVEVEFGSSPGCLFLWSSFAEVVRSSCLTVLRNIESLCLDRRNPGTSGTCSSGSRRIC

SEQ ID NO: 100045 - protein, 57 aa, Homo sapiens
MMQESGTETKSNGSAIQNGSGGSNHLLECGGLREGRSNGETPAVDIGAADLAHAQQQ

SEQ ID NO: 100046 - protein, 112 aa, Homo sapiens
ESFMFRTWGADVINMTTVPEVVLAKEAGICYASIAMATDYDCWKEHEEAMIKFQMILSEGYHPFNIQESPFYRGLLDFPSVGHGRGEILPLSPLDLAGYCFQQPMQPPCPDS

SEQ ID NO: 100047 - protein, 89 aa, Homo sapiens
MPGEVQASYLKSQSKLSDEGRLEPRKFHCKGVKVPRNFRLLEELEEGQKGVGDGTVSWGLEDDEDMTLTRWTGMIIGPPRFQFIYLNLL

SEQ ID NO: 100048 - protein, 91 aa, Homo sapiens
MPGPPRSLEMGLLTFRDVAIEFSLEEWQHLDIAQQNLYRNVMLENYRNLAFLGIAVSKPDLITCLEQGKEPWNMKRHEMVDEPPGLDFSLL

SEQ ID NO: 100049 - protein, 382 aa, Homo sapiens
MFKIQLEPLKLRAWTLNGFVKFRNKETSAGPVAVMGKDYYKILGIPSGANEDEIKKAYRKMALKYHPDKNKEPNAEEKFKEIAEAYDVLSDPKKRGLYDQYGEEGLKTGGGTSGGSSGSFHYTFHGDPHATFASFFGGSNPFDIFFASSRSTRPFSGFDPDDMDVDEDEDPFGAFGRFGFNGLSRGPRRAPEPLYPRRKVQDPPVVHELRVSLEEIYHGSTKRMKITRRRLNPDGRTVRTEDKILHIVIKRGWKEGTKITFPKEGDATPDNIPADIVFVLKDKPHAHFRRDGTNVLYSALISLKEALCGCTVNIPTIDGRVIPLPCNDVIKPGTVKRLRGEGLPFPKVPTQRGDLIVEFKVRFPDRLTPQTRQILKQHLPCS

SEQ ID NO: 100050 - protein, 169 aa, Homo sapiens
MSRINKNVVLALLTLTSSAFLLFQLYYYKHYLSTKNGAGLSKSKGSRIGFDSTQWRAVKKFIMLTSNQNVPVFLIDPLILELINKNFEQVKNTSHGSTSQCKFFCVPRDFTAFALQYHLWKNEGLTLSPRLECSGTILAHCSLDLSGSSDPPGSDPQVAGTTGRLVSDS

SEQ ID NO: 100051 - protein, 235 aa, Homo sapiens
MTFDLTKITKTSSSFEVRTWDPEGVIFYGDTNPKDDWFMLGLRDGRPEIQLHNHWAQLTVGAGPRLDDGRWHQVEVKMEGDSVLLEVDGEEVLRLRQVSGPLTSKRHPIMRIALGGLLFPASNLRLPLVPALDGCLRRDSWLDKQAEISASAPTSLRSCDVESNPGIFLPPGTQAEFNLRDIPQPHAEPWAFSLDLGLKQAAGSGHLLALGTPENPSWLSLHLQDQEKTLPPLFA

SEQ ID NO: 100052 - protein, 108 aa, Homo sapiens
MDKLKKVLSGQDTEDRSGLSEVVEASSLSWSTRIKGFIACFAIGILCSLLGTVLLWVPRKGLHLFAVFYTFGNIASIGSCVLHLPCVLPFGGITRDLHLSSAFCSLWH

SEQ ID NO: 100053 - protein, 280 aa, Homo sapiens
MTGGAREKAHIARSPATAQGPALGEALPHVVPTLRACLQPSQDPQMRLKLFSILSTVLLRATDTINSQGQFPSYLETVTKDILAPNLQWHAGRTAAAIRTAAVSCLWALTSSEVLSAEQIRDVQETLMPQVLTTLEEDSKMTRLISCRIINTFLKTSGGMTDPEKLIRIYPELLKRLDDVSNDVRMAAASTLVTWLQCVKGANAKSYYQSSVQYLYRELLVHLDDPERAIQDAILEVLKEGSGLFPDLLVRETEAVIHKHRSATYCEQLLQHVQAVPATQ

SEQ ID NO: 100054 - protein, 164 aa, Homo sapiens
MREIVHIQAGQCGNQIGAKFWEVISDEHGIDPSGNYVGDSDLQLERISVYYNEASSHKYVPRAILVDLEPGTMDSVRSGAFGHLFRPDNFIFGKFPLLQALMADPITGKPRSVDGDGCEKQGMVSSSHDPEWWELISPFYSWALEAQRKGSVGRTETTHAFQVE

SEQ ID NO: 100055 - protein, 400 aa, Homo sapiens
MSKVSTMFSEDDFQSTERAPYGPQLQWSQDLPRVQVFREQANLEDRSPRRTQRITGGEQVLWGPITQIFPTVRPADLTRVIMPLEQRSQHCKPEEGLQAQEEDLGLVGAQALQAEEQEAAFFSSTLNVGTLEELPAAESPSPPQSPQEESFSPTAMDAIFGSLSDEGSGSQEKEGPSTSPDLIDPESFSQDILHDKIIDLVHLLLRKYRVKGLITKAEMLGSVIKNYEDYFPEIFREASVCMQLLFGIDVKEVDPTSHSYVLVTSLNLSYDGIQCNEQSMPKSGLLIIVLGVIFMEGNCIPEEVMWEVLSIMGVYAGREHFLFGEPKRLLTQNWVQEKYLVYRQVPGTDPACYEFLWGPRAHAETSKMKVLEYIANANGRDPTSYPSLYEDALREEGEGV

SEQ ID NO: 100056 - protein, 28 aa, Homo sapiens
MLSRNDGPGLLRAGTPLCISAEAASAQQ

SEQ ID NO: 100057 - protein, 54 aa, Homo sapiens
MAGEQKPSSNLLEQFILLAKGTSGSALTALISQVLEAPGVYVFGELLELANVQE

SEQ ID NO: 100058 - protein, 155 aa, Homo sapiens
MCIVLRPSRVHNSEENTMRALTLKDILNGTFSYKTFFPNWISGQEYLHQSADNNIVLYNIETGQSYTILSNRTMKSVNASNYGLSPDRQFVYLESDYSKLWRYSYTATYYIYDLSNGEFVRGNELPRPIQYLCWSPVGSKLAYVYQNNIYLKQRP

SEQ ID NO: 100059 - protein, 135 aa, Homo sapiens
MGYKLQDLTDVQIMARLQEESLRQDYASTSASVSRHSSSVSLSSGKKGTCSDQEYDQYSLEDEEEFDHLPPPQPRLPRCSPFQRGIPHSQTFSSIRECRRSPSSQYFPSNNYQQQQYYSPQAQTPDQQPNRTNGG

SEQ ID NO: 100060 - protein, 36 aa, Homo sapiens
SPPPPGGGEKPLAPPPGWVEPPKWLGLQGPSGGPGV

SEQ ID NO: 100061 - protein, 60 aa, Homo sapiens
MEADIITNLRCRLKEAEEERLKAAQYGLQLVESQNELQNQLDKCRNEMMTMTERLLDLTC

SEQ ID NO: 100062 - protein, 148 aa, Homo sapiens
MLDTSFITPQEIVSISALSTTEVAMHTSTSSSVTKSYISSQTNDTHKRDTYAATPRAHEVSEISVRTVYPPEEETGERVQLAHHFSEPEITLIIFGVMAGVIGTILLISYGIRRLIKKSPSDVKPLPSPDTDVPLSSVEIENPETSDQ

SEQ ID NO: 100063 - protein, 283 aa, Homo sapiens
MAESRGRLYLWMCLAAALASFLMGFMVGWFIKPLKETTTSVRYHQSIRWKLVSEMKAENIKSFLRSFTKLPHLAGTEQNFLLAKKIQTQWKKFGLDSAKLVHYDVLLSYPNETNANYISIVDEHETEIFKTSYLEPPPDGYENVTNIVPPYNAFSAQGMPEGDLVYVNYARTEDFFKLEREMGINCTGKIVIARYGKIFRGNKVKNAMLAGAIGIILYSDPADYFAPEVQPYPKGWNLPGTAAQRGNVLNLNGAGDPLTPGYPAKATWEELLHQIRVGREPLM

SEQ ID NO: 100064 - protein, 46 aa, Homo sapiens
MESPASSQPASMPQSKGRWMQRPVHIPPRPARSVVPTHPAHMCKCP

SEQ ID NO: 100065 - protein, 610 aa, Homo sapiens
MVFQTRYPSWIILCYIWLLRFAHTGEAQAAKEVLLLDSKAQQTELEWISSPPNGWEEISGLDENYTPIRTYQVCQVMEPNQNNWLRTNWISKGNAQRIFVELKFTLRDCNSLPGVLGTCKETFNLYYYETDYDTGRNIRENLYVKIDTIAADESFTQGDLGERKMKLNTEVREIGPLSKKGFYLAFQDVGACIALVSVKVYYKKCWSIIENLAIFPDTVTGSEFSSLVEVRGTCVSSAEEEAENAPRMHCSAEGEWLVPIGKCICKAGYQQKGDTCEPCGRGFYKSSSQDLQCSRCPTHSFSDKEGSSRCECEDGYYRAPSDPPYVACTRPPSAPQNLIFNINQTTVSLEWSPPADNGGRNDVTYRILCKRCSWEQGECVPCGSNIGYMPQQTGLEDNYVTVMDLLAHANYTFEVEAVNGVSDLSRSQRLFAAVSITTGQAAPSQVSGVMKERVLQRSVELSWQEPEHPNGVITEYEIKYYEKDQRERTYSTVKTKSTSASINNLKPGTVYVFQIRAFTAAGYGNYSPRLDVATLEEATGKMFEATAVSSEQNPVIIIAVVAVAGTIILVFMVFGFIIGRRHCGYSKADQEGDEELYFHSLVTNEHLSVL

SEQ ID NO: 100066 - protein, 365 aa, Homo sapiens
MANMQGLVERLERAVSRLESLSAESHRPPGNCGEVNGVIAGVAPSVEAFDKLMDSMVAEFLKNSRILAGDVETHAEMVHSAFQAQRAFLLMASQYQQPHEGPVASTVSAFSVLSSGPGLPPPPPPLPPPGPPPLFENEGKKEESSPSRSALFAQLNQGEAITKGLRHVTDDQKTYKNPSLRAQGGQTQSPTKSHTPSPTSPKSYPSQKHAPVLELEGKKWRVEYQEDRNDLVISETELKQVAYIFKCEKSTIQIKGKVNSIIIDNCKKLGLVFDNVVGIVEVINSQDIQIQVMGRVPTISINKTEGCHIYLSEDALDCEIVSAKSSEMNILIPQDGDYREFPIPEQFKTAWDGSKLITEPAEIMA

SEQ ID NO: 100067 - protein, 145 aa, Homo sapiens
MACGATLKRPMEFEAALLSPGSPKRRRCAPLPGPTPGLRPPDAEPPPPFQTQTPPQSLQQPAPPGSERRLPTPGSSWMKKDQPTFTLRQVGIICERLLKDYEDKIREEYEQILNTKLAEQYESFVKFTHDQIMRRYGTRPTSYVS

SEQ ID NO: 100068 - protein, 385 aa, Homo sapiens
MARRPRHSIYSSDEDDEDFEMCDHDYDGLLPKSGKRHLGKTRWTREEDEKLKKLVEQNGTDDWKVIANYLPNRTDVQCQHRWQKVLNPELIKGPWTKEEDQRVIELVQKYGPKRWSVIAKHLKGRIGKQCRERWHNHLNPEVKKTSWTEEEDRIIYQAHKRLGNRWAEIAKLLPGRTDNAIKNHWNSTMRRKVEQEGYLQESSKASQPAVATSFQKNSHLMGFAQAPPTAQLPATGQPTVNNDYSYYHISEAQNVSSHVPYPVALHVNIVNVPQPAAAAIQRHYNDEDPEKEKRIKELELLLMSTENELKGQQTQNHTCSYPGWHSTTIADHTRPHGDSAPVSCLGEHHSTPSLPADPGSLPEESASPARCRVSGGPCSTSEGQP

SEQ ID NO: 100069 - protein, 171 aa, Homo sapiens
  MOD_RES (1)..(1): Any amino acid
XGTRTNKGLQLRHGNDQRVFRLEFVSNQEFTESEFMKWKEAMFSAGMQLPTLDEINKKELSIKEALNYKFNDQDIEEIVKEKERFRKAPPNYAMKKTQLLKEKAMAEDLGDQDKAKQIQDQLNELEERAEALDRQRTKNISAISYINQRNREWNIVESEKALVVRKLYLNH

SEQ ID NO: 100070 - protein, 210 aa, Homo sapiens
MVSSCCGSVCSDQGCGQDLCQETCCRPSCCETTCCRTTCCRPSCCVSSCCRPQCCQSVCCQPTCSRPSCCQTTCCRTTCYRPSCCVSSCCRPQCCQPVCCQPTCCRPSCCETTCCHPRCCISSCCRPSCCVSSCCKPQCCQSVCCQPNCCRPSCSISSCCRPSCCESSCCRPCCCVRPVCGRVSCHTTCYRPTCVISSCPRPLCCASSCC

SEQ ID NO: 100071 - protein, 245 aa, Homo sapiens
MAVESGVISTLIPQDPPEQELILVKVEDNFSWDEKFKQNGSTQSCQELFRQQFRKFCYQETPGPREALSRLQELCYQWLMPELHTKEQILELLVLEQFLSILPEELQIWVQQHNPESGEEAVTLLEDLEREFDDPGQQVPASPQGPAVPWKDLTCLRASQESTDIHLQPLKTQLKSWKPCLSPKSELSRPPKASSAIRWECVSPGSFPGDIIAAEATHSTISCFAINTLPATILPSKNVNRKYFS

SEQ ID NO: 100072 - protein, 3848 aa, Homo sapiens
MAFVATQGATVVDQTTLMKKYLQFVAALTDVNTPDETKLKMMQEVSENFENVTSSPQYSTFLEHIIPRFLTFLQDGEVQFLQEKPAQQLRKLVLEIIHRIPTNEHLRPHTKNVLSVMFRFLETENEENVLICLRIIIELHKQFRPPITQEIHHFLDFVKQIYKELPKVVNRYFENPQVIPENTVPPPEMVGMITTIAVKVNPEREDSETRTHSIIPRGSLSLKVLAELPIIVVLMYQLYKLNIHNVVAEFVPLIMNTIAIQVSAQARQHKLYNKELYADFIAAQIKTLSFLAYIIRIYQELVTKYSQQMVKGMLQLLSNCPAETAHLRKELLIAAKHILTTELRNQFIPCMDKLFDESILIGSGYTARETLRPLAYSTLADLVHHVRQHLPLSDLSLAVQLFAKNIDDESLPSSIQTMSCKLLLNLVDCIRSKSEQESGNGRDVLMRMLEVFVLKFHTIARYQLSAIFKKCKPQSELGAVEAALPGVPTAPAAPGPAPSPAPVPAPPPPPPPPPPATPVTPAPVPPFEKQGEKDKEDKQTFQVTDCRSLVKTLVCGVKTITWGITSCKAPGAQFIPNKQLQPKETQIYIKLVKYAMQALDIYQVQIAGNGQTYIRVANCQTVRMKEEKEVLEHFAGVFTMMNPLTFKEIFQTTVPYMVERISKNYALQIVANSFLANPTTSALFATILVEYLLDRLPEMGSNVELSNLYLKLFKLVFGSVSLFAAENEQMLKPHLHKIVNSSMELAQTAKEPYNYFLLLRALFRSIGGGSHDLLYQEFLPLLPNLLQGLNMLQSGLHKQHMKDLFVELCLTVPVRLSSLLPYLPMLMDPLVSALNGSQTLVSQGLRTLELCVDNLQPDFLYDHIQPVRAELMQALWRTLRNPADSISHVAYRVLGKFGGSNRKMLKESQKLHYVVTEVQGPSITVEFSDCKASLQLPMEKAIETALDCLKSANTEPYYRRQAWEVIKCFLVAMMSLEDNKHALYQLLAHPNFTEKTIPNVIISHRYKAQDTPARKTFEQALTGAFMSAVIKDLRPSALPFVASLIRHYTMVAVAQQCGPFLLPCYQVGSQPSTAMFHSEENGSKGMDPLVLIDAIAICMAYEEKELCKIGEVALAVIFDVASIILGSKERACQLPLFSYIVERLCACCYEQAWYAKLGGVVSIKFLMERLPLTWVLQNQQTFLKALLFVMMDLTGEVSNGAVAMAKTTLEQLLMRCATPLKDEERAEEIVAAQEKSFHHVTHDLVREVTSPNSTVRKQAMHSLQVLAQVTGKSVTVIMEPHKEVLQDMVPPKKHLLRHQPANAQIGLMEGNTFCTTLQPRLFTMDLNVVEHKVFYTELLNLCEAEDSALTKLPCYKSLPSLVPLRIAALNALAACNYLPQSREKIIAALFKALNSTNSELQEAGEACMRKFLEGATIEVDQIHTHMRPLLMMLGDYRSLTLNVVNRLTSVTRLFPNSFNDKFCDQMMQHLRKWMEVVVITHKGGQRSDGNEMKICSAIINLFHLIPAAPQTLVKPLLEVVMKTERAMLIEAGSPFREPLIKFLTRHPSQTVELFMMEATLNDPQWSRMFMSFLKHKDARPLRDVLAANPNRFITLLLPGGAQTAVRPGSPSTSTMRLDLQFQAIKIISIIVKNDDSWLASQHSLVSQLRRVWVSENFQERHRKENMAATNWKEPKLLAYCLLNYCKRNYGDIELLFQLLRAFTGRFLCNMTFLKEYMEEEIPKNYSIAQKRALFFRFVDFNDPNFGDELKAKVLQHILNPAFLYSFEKGEGEQLLGPPNPEGDNPESITSVFITKVLDPEKQADMLDSLRIYLLQYATLLVEHAPHHIHDNNKNRNSKLRRLMTFAWPCLLSKACVDPACKYSGHLLLAHIIAKFAIHKKIVLQVFHSLLKAHAMEARAIVRQAMAILTPAVPARMEDGHQMLTHWTRKIIVEEGHTVPQLVHILHLIVQHFKVYYPVRHHLVQHMVSAMQRLGFTPSVTIEQRRLAVDLSEVVIKWELQRIKDQQPDSDMDPNSSGEGVNSVSSSIKRGLSVDSAQEVKRFRTATGAISAVFGRSQSLPGADSLLAKPIDKQHTDTVVNFLIRVACQVNDNTNTAGSPGEVLSRRCVNLLKTALRPDMWPKSELKLQWFDKLLMTVEQPNQVNYGNICTGLEVLSFLLTVLQSPAILSSFKPLQRGIAACMTCGNTKVLRAVHSLLSRLMSIFPTEPSTSSVASKYEELECLYAAVGKVIYEGLTNYEKATNANPSQLFGTLMILKSACSNNPSYIDRLISVFMRSLQKMVREHLNPQAASGSTEATSAGTSELVMLSLELVKTRLAVMSMEMRKNFIQAILTSLIEKSPDAKILRAVVKIVEEWVKNNSPMAANQTPTLREKSILLVKMMTYIEKRFPEDLELNAQFLDLVNYVYRDETLSGSELTAKLEPAFLSGLRCAQPLIRAKFFEVFDNSMKRRVYERLLYVTCSQNWEAMGNHFWIKQCIELLLAVCEKSTPIGTSCQGAMLPSITNVINLADSHDRAAFAMVTHVKQEPRERENSESKEEDVEIDIELAPGDQTSTPKTKELSEKDIGNQLHMLTNRHDKFLDTLREVKTGALLSAFVQLCHISTTLAEKTWVQLFPRLWKILSDRQQHALAGEISPFLCSGSHQVQRDCQPSALNCFVEAMSQCVPPIPIRPCVLKYLGKTHNLWFRSTLMLEHQAFEKGLSLQIKPKQTTEFYEQESITPPQQEILDSLAELYSLLQEEDMWAGLWQKRCKYSETATAIAYEQHGFFEQAQESYEKAMDKAKKEHERSNASPAIFPEYQLWEDHWIRCSKELNQWEALTEYGQSKGHINPYLVLECAWRVSNWTAMKEALVQVEVSCPKEMAWKVNMYRGYLAICHPEEQQLSFIERLVEMASSLAIREWRRLPHVVSHVHTPLLQAAQQIIELQEAAQINAGLQPTNLGRNNSLHDMKTVVKTWRNRLPIVSDDLSHWSSIFMWRQHHYQAIVTAYENSSQHDPSSNNAMLGVHASASAIIQYGKIARKQGLVNVALDILSRIHTIPTVPIVDCFQKIRQQVKCYLQLAGVMGKNECMQGLEVIESTNLKYFTKEMTAEFYALKGMFLAQINKSEEANKAFSAAVQMHDVLVKAWAMWGDYLENIFVKERQLHLGVSAITCYLHACRHQNESKSRKYLAKVLWLLSFDDDKNTLADAVDKYCIGVPPIQWLAWIPQLLTCLVGSEGKLLLNLISQVGRVYPQAVYFPIRTLYLTLKIEQRERYKSDSGQQQPSSVGNQSHSASDPGPIRATAPMWRCSRIMHMQRELHPTLLSSLEGIVDQMVWFRENWHEEVLRQLQQGLAKCYSVAFEKSGAVSDAKITPHTLNFVKKLVSTFGVGLENVSNVSTMFSSAASESLARRAQATAQDPVFQKLKGQFTTDFDFSVPGSMKLHNLISKLKKWIKILEAKTKQLPKFFLIEEKCRFLSNFSAQTAEVEIPGEFLMPKPTHYYIKIARFMPRVEIVQKHNTAARRLYIRGHNGKIYPYLVMNDACLTESRREERVLQLLRLLNPCLEKRKETTKRHLFFTVPRVVAVSPQMRLVEDNPSSLSLVEIYKQRCAKKGIEHDNPISRYYDRLATVQARGTQASHQVLRDILKEVQSNMVPRSMLKEWALHTFPNATDYWTFRKMFTIQLALIGFAEFVLHLNRLNPEMLQIAQDTGKLNVAYFRFDINDATGDLDANRPVPFRLTPNISEFLTTIGVSGPLTASMIAVARCFAQPNFKVDGILKTVLRDEIIAWHKKTQEDTSSPLSAAGQPENMDSQQLVSLVQKAVTAIMTRLHNLAQFEGGESKVNTLVAAANSLDNLCRMDPAWHPWL

SEQ ID NO: 100073 - protein, 181 aa, Homo sapiens
MQTFLKGKRVGYWLSEKKIKKLNFQAFAELCRKRGMEVVQEYIDAHPETIVLDPLPAIRTLLDRSKSYELIRKIEAYMEDDRICSPPFMELTSLCGDDTMRLLEKNGLTFPFICKTRVAHGTNSHEMAIVFNQEGLNAIQPPCVVQNFINHNAVLYKVFVVGESYTVVQRPSLKNFSAGTS

SEQ ID NO: 100074 - protein, 339 aa, Homo sapiens
MKTSASPFFLAVGYHKPHIPFRYPKEFQKLYPLENITLAPDPEVPDGLPPVAYNPWMDIRQREDVQALNISVPYGPIPVDFQRKIRQSYFASVSYLDTQVGRLLSALDDLQLANSTIIAFTSDHGWALGEHGEWAKYSNFDVATHVPLIFYVPGRTASLPEAGEKLFPYLDPFDSASQLMEPGRQSMDLVELVSLFPTLAGLAGLQVPPRCPVPSFHVELCREGKNLLKHFRFRDLEEDPYLPGNPRELIAYSQYPRPSDIPQWNSDKPSLKDIKIMGYSIRTIDYRYTVWVGFNPDEFLANFSDIHAGELYFVDSDPLQDHNMYNDSQGGDLFQLLMP

SEQ ID NO: 100075 - protein, 133 aa, Homo sapiens
MAPKLITVLCLGFCLNQKICPHAGAQDKFSLSAWPSPVVPLGGRVTLSCHSHLRFVIWTIFQTTGTRSHELHTGLSNNITISPVTPEHAGTYRCVGIYKHASKWSAESNSLKIIVTGGPHDEAGREVDPLLQL

SEQ ID NO: 100076 - protein, 75 aa, Homo sapiens
MAVTALAARTWLGVWGVRTMQARGFGSDQSENVDRGAGSIREAGGAFGKREQAEEERYFRALGATFCFFAVEAVV

SEQ ID NO: 100077 - protein, 400 aa, Homo sapiens
METQELRGALALLLLCFFTSASQDLQVIDLLTVGESRQMVAVAEKIRTALLTAGDIYLLSTFRLPPKQGGVLFGLYSRQDNTRWLEASVVGKINKVTNALHSILGEGNVPDPKHHYGVSGFHEQRSHCSPNPCFRGVDCMEVYEYPGYRCGPCPPGLQGNGTHCSDINECAHADPCFPGSSCINTMPGFHCEACPRGYKGTQVSGVGIDYARASKQVCNDIDECNDGNNGGCDPNSICTNTVGSFKCGPCRLGFLGNQSQGCLPARTCHSPAHSPCHIHAHCLFERNGAVSCQCNVGWAGNGNVCGTDTDIDGYPDQALPCMDNNKHCKQDNCLLTPNSGQEDADNDGVGDQCDDDADGDGIKNVEASPMDWTIALKSPTHYRQTGMRTGWEMLATAALK

SEQ ID NO: 100078 - protein, 890 aa, Homo sapiens
MEGKSYVFRVLSANRHGLSEPSEITSPIQAQDVTVVPSAPGRVLASRNTKTSVVVQWDRPKHEEDLLGYYVDCCVAGTNLWEPCNHKPIGYNRFVVHGLTTGEQYIFRVKAVNAVGMSENSQESDVIKVQAALTVPSHPYGITLLNCDGHSMTLGWKVPKFSGGSPILGYYLDKREVHHKNWHEVNSSPSKPTILTVDGLTEGSLYEFKIAAVNLAGIGEPSDPSEHFKCEAWTMPEPGPAYDLTFCEVRDTSLVMLWKAPVYSGSSPVSGYFVDFREEDAGEWITVNQTTTASRYLKVSDLQQGKTYVFRVRAVNANGVGKPSDTSEPVLVEARPGTKEISAGVDEQGNIYLGFDCQEMTDASQFTWCKSYEEISDDERFKIETVGDHSKLYLKNPDKEDLGTYSVSVSDTDGVSSSFVLDPEELERLMALSNEIKNPTIPLKSELAYEIFDKGRVRFWLQAEHLSPDASYRFIINDREVSDSEIHRIKCDKATGIIEMVMDRFSIENEGTYTVQIHDGKAKSQSSLVLIGDAFKTVLEEAEFQRKEFLRKQGPHFAEYLHWDVTEECEVRLVCKVANTKKETVFKWLKDDVLYETETLPNLERGICELLIPKLSKKDHGEYKATLKDDRGQDVSILEIAGKVYDDMILAMSRVCGKSASPLKVLCTPEGIRLQCFMKYFTDEMKVNWCHKDAKISSSEHMRIGGSEEMAWLQICEPTEKDKGKYTFEIFDGKDNHQRSLDLSGQAFDEAFAEFQQFKAAAFAEKNRGRLIGGLPDVVTIMEGKTLNLTCTVFGNPDPEVIWFKNDQDIQLSEHFSVKVEQAKYVSMTIKGVTSEDSGKYSINIKNKYGGEKIDVTVSVYKHGEKIPDMAPPQQAKPKLIPASASAAGQ

SEQ ID NO: 100079 - protein, 258 aa, Homo sapiens
MIPLQKDNQEEGVCPICQESLKEAVSTNCGHLFCRVCLTQHVEKASASGVFCCPLCRKPCSEEVLGTGYICPNHQKRVCRFCEESRLLLCVECLVSPEHMSHHELTIENALSHCKERLNRRSRKLRKDIAELQRLKAQQEKKLQALQFQVDHGNHRLEAGPESQHQTREQLGALPQQWLGQLEHMPAEAARILDISRAVTQLRSLVIDLERTAKELDTNTLKNAGDLLNRSAPQKLEVIYPQLEKGVSELLLQPPQKL

SEQ ID NO: 100080 - protein, 44 aa, Homo sapiens
MSSTSSKRAPTTATQRLKQDYLRIKKDPVPYICAEPLPSNILEW

SEQ ID NO: 100081 - protein, 902 aa, Homo sapiens
MSGQTLTDRIAAAQYSVTGSAVARAVCKATTHEVMGPKKKHLDYLIQATNETNVNIPQMADTLFERATNSSWVVVFKALVTTHHLMVHGNERFIQYLASRNTLFNLSNFLDKSGSHGYDMSTFIRRYSRYLNEKAFSYRQMAFDFARVKKGADGVMRTMAPEKLLKSMPILQGQIDALLEFDVHPNELTNGVINAAFMLLFKDLIKLFACYNDGVINLLEKFFEMKKGQCKDALEIYKRFLTRMTRVSEFLKVAEQVGIDKGDIPDLTQAPSSLMETLEQHLNTLEGKKPGNNEGSGAPSPLSKSSPATTVTSPNSTPAKTIDTSPPVDLFATASAAVPVSTSKPSSDLLDLQPDFSSGGAAAAAAPAPPPPAGGATAWGDLLGEDSLAALSSVPSEAQISDPFAPEPTPPTTTAEIATASASASTTTTVTAVTAEVDLFGDAFAASPGEAPAASEGAAAPATPTPVAAALDACSGNDPFAPSEGSAEAAPELDLFAMKPPETSVPVVTPTASTAPPVPATAPSPAPAVAAAAAATTAATAAATTTTTTSAATATTAPPALDIFGDLFESTPEVAAAPKPDAAPSIDLFSTDAFSSPPQGASPVPESSLTADLLSVDAFAAPSPATTASPAKVDSSGVIDLFGDAFGSSASEPQPASQAASSSSASADLLAGFGGSFMAPSPSPVTPAQNNLLQPNFEAAFGTTPSTSSSSSFDPSGDLLMPTMAPAGQPAPVSMVPPSPAMAASKALGSDLDSSLASLVGNLGISGTTTKKGDLQWNAGEKKLTGGANWQPKVAPATWSAGVPPSAPLQGAVPPTSSVPPVAGAPSVGQPGAGFGMPPAGTGMPMMPQQPVMFAQPMMRPPFGAAAVPGTQLSPSPTPASQSPKKPPAKDPLADLNIKDFL

SEQ ID NO: 100082 - protein, 632 aa, Homo sapiens
MAEETQHNKLAAAKKKLKEYWQKNRPRVPAGVNRNRKTNGSIPETATSGGCQPPGDSATDFHREGPTSSATLKDLESPCQERAVVLDSTSVKISRLKNTIKSLKQQKKQVEHQLEEEKKANNERQKAERELEVQIQTLIIQKEELNTDLYHMERSLRYFEEESKDLAVRLQHSLQCKGELESALSAVIATEKKKANQLSSCSKAHTEWELEQSLQDQALLKVQLTQLKESFQQLQLERDECAEHIEGERARWHQRMSKMSQEICTLKKEKQQDMRRVEQLEWSLSKLKNQTAEPLPPEPPAVPSEVELQHLRKELERVAGELQAQVKNNQHISLLNRRQEERIREQEERLRKQEERLQEQHEKLRQLAKPQSVFEELNNENKSTLQLEQQVKELQEKLGEEHLEAASQQNQQLTAQLSLMALPGEGHGGEHLDSEGEEAPQPMPSVPEDLESREAMSSFMDHLKEKADLSELVKKQELRFIQYWQERCHQKIHHLLSEPGGRAKDAALGGGHHQAGAQGGDEGEAAGAAADGIAAYSNYNNGHRKFLAAAHNPADEPGPGAPAPQELGATDKHGDLREVTLTSSAQGEAREDPLLDKPTAQPIVQDHQEHPGLGSNCCVPLFCWAWLPRRRR

SEQ ID NO: 100083 - protein, 259 aa, Homo sapiens
  MOD_RES (1)..(1): Any amino acid
XLPLLRKILLDLQRTHEDEYSRGVLSPGRHVRTRLYFTSESHVHSLLSVFRYGGLLDETQDAQWQRALDYLSAISELNYMTQIVIMLYEDNTQDPLSEERFHVELHFSPGVKGVEEEGSAPAGCGFRPASSENEEMKTNQGSMENLCPGKASDEPDRALQTSPQPPEGPGLPRRSPLIRNRKAGSMEVLSETSSSRPGGYRLFSSSRPPTEMKQSGLGSQCTGLFSTTVLGGSSSAPNLQDYARSHGKKLPPASLKHRD

SEQ ID NO: 100084 - protein, 265 aa, Homo sapiens
MFVSKRRFILKTCGTTLLLKALVPLLKLARDYSGFDSIQSFFYSRKNFMKPSHQGYPHRNFQEEIEFLNAIFPNGAAYCMGRMNSDCWYLYTLDFPESRVISQPDQTLEILMSELDPAVMDQFYMKDGVTAKDVTRESGIRDLIPGSVIDATMFNPCGYSMNGMKSDGTYWTIHITPEPEFSYVSFETNLSQTSYDDLIRKVVEVFKPGKFVTTLFVNQSSKCRTVLASPQKIEGFKRLDCQSAMFNDYNFVFTSFAKKQQQQQS

SEQ ID NO: 100085 - protein, 209 aa, Homo sapiens
MPYGGRGDPVNVSRVISAMVNSLDDNGVLIGNWSGDYSRGTNPSAWVGSVEILLSYLRTGYSVPYGQCWVFAGVTTTVLRCLGLATRTVTNFNSAHDTDTSLTMDIYFDENMKPLEHLNHDSVWNFHVWNDCWMKRPDLPSGFDGWQVVDATPQETSSGIFCCGPCSVESIKNGLVYMKYDTPFIFAEVNSDKVYWQRQDDGSFKIVYV

SEQ ID NO: 100086 - protein, 21 aa, Homo sapiens
MPRKIEEIKDFLLTARRKDAK

SEQ ID NO: 100087 - protein, 702 aa, Homo sapiens
MEGAHASLSLEDEVSGAGSRQRPLEGKGGETPAAEEPGSLKNYAVFATRDVSAAPEKEEEEAEGPLRAQDLRESYIQLVQGVQEWQDGCMYQGEFGLNMKLGYGKFSWPTGESYHGQFYRDHCHGLGTYMWPDGSSFTGTFYLSHREGYGTMYMKTRLFQTHCHNDIVNLLLDCGADVNKCSDEGLTALSMCFLLHYPAQSFKPNVAERTIPEPQEPPKFPVVPILSSSFMDTNLESLYYELSQAMLERSAQSHSLLKMASPSPCTSSFDKGTMRRMALSMIERRKRWRTIKLLLRRGADPNLCCVPMQVLFLAVKAGDVDGVRLLLEHGARTDICFPPQLSTLTPLHIAAALPGEEGVQIVELLLHAITDVDAKASDEDDTYKPGKLDLLPSSLKLSNEPGPPQAYYSTDTALPEEGGRTALHMACEREDDNKCARDIVRLLLSHGANPNLLWSGHSPLSLSIASGNELVVKELLTQGADPNLPLTKGLGSALCVACDLTYEHQRNMDSKLALIDRLISHGADILKPVMLRQGEKEAVGTAVDYGYFRFFQDRRIARCPFHTLMPAERETFLARKRLLEYMGLQLRQAVFAKESQWDPTWLYLCKRAELIPSHRMKKKGPSLPRGLDVKEQGQIPFFKFCYQCGRSIGVRLLPCPRCYGILTCSKYCKTKAWTEFHKKDCGDLVAIVTQLEQVSRRREEFQ

SEQ ID NO: 100088 - protein, 25 aa, Homo sapiens
MSLSENSVFAYESSVHSTNVLLSLN

SEQ ID NO: 100089 - protein, 172 aa, Homo sapiens
MAEYDLTTRIAHFLDRHLVFPLLEFLSVKEIYNEKELLQGKLDLLSDTNMVDFAMDVYKNLYSDDIPHALREKRTTVVAQLKQLQAETEPIVKMFEDPETTRQMQSTRDGRMLFDYLADKHGFRQEYLDTLYRYAKFQYECGNYSGAAEYLYFFRVLMESCYVAQADLKLLA

SEQ ID NO: 100090 - protein, 650 aa, Homo sapiens
  MOD_RES (1)..(1): Any amino acid
XRLPRAGGPLGLSIVGGSDHSSHPFGVQEPGVFISKVLPRGLAARSGLRVGDRILAVNGQDVRDATHQEAVSALLRPCLELSLLVRRDPAPPGLRELCIQKAPGERLGISIRGGARGHAGNPRDPTDEGIFISKVSPTGAAGRDGRLRVGLRLLEVNQQSLLGLTHGEAVQLLRSVGDTLTVLVCDGFEASTDAALEVSPGVIANPFAAGIGHRNSLESISSIDRELSPEGPGKEKELPGQTLHWGPEATEAAGRGLQPLKLDYRALAAVPSAGSVQRVPSGAAGGKMAESPCSPSGQQPPSPPSPDELPANVKQAYRAFAAVPTSHPPEDAPAQPPTPGPAASPEQLSFRERQKYFELEVRVPQAEGPPKRVSLVGADDLRKMQEEEGEGHGSGVGVGSRLVWPDPPCPPAARKLQQKRAQMLREAAEAGAEARLALDGETLGEEEQEDEQPPWASPSPTSRQSPASPPPLGGGAPVRTAKAERRHQERLRVQSPEPPAPERALSPAELRALEAEKRALWRAARMKSLEQDALRAQMVLSRSQEGRGTRGPLERLAEAPSPAPTPSPTPVEDLGPQTSTSPGRLSPDFAEELRSLEPSPSPGPQEEDGEVALVLLGRPSPGAVGPEDVALCSSRRPVRPGRRGLGPVPS

SEQ ID NO: 100091 - protein, 128 aa, Homo sapiens
LKSLLAGLSLPSRDDRTDRGLDEEGEEESSAGSLPLVSVSLFTPLTAAEMAPYMKRLSRGQTVEGESGPASPTPDLLEVLSDIDEMSRRRPEILSFFSTNLQRLMSSAEECCRNLAFSLALRSMQNSP

SEQ ID NO: 100092 - protein, 101 aa, Homo sapiens
MGPLTIRDVTVEFSLEEWHCLDTAQQNLYRDVMLENYRNLVFLGIAVSKPDLITCLEQGKEPCNMKRHEMVAKPPDSHSVSQAGLQWFNDGSQQLQPPKLR

SEQ ID NO: 100093 - protein, 413 aa, Homo sapiens
MAAVPQNNLQEQLERHSARTLNNKLSLSKPKFSGFTFKKKTSSDNNVSVTNVSVAKTPVLRNKDVNVTEDFSFSEPLPNTTNQQRVKDFFKNAPAGQETQRGGSKSLLPDFLQTPKEVVCTTQNTPTVKKSRDTALKKLEFSSSPDSLSTINDWDDMDDFDTSETSKSFVTPPQSHFVRVSTAQKSKKGKRNFFKAQLYTTNTVKTDLPPPSSESEQIDLTEEQKDDSEWLSSDVICIDDGPIAEVHINEDAQESDSLKTHLEDERDNSEKKKNLEEAELHSTEKVPCIEFDDDDYDTDFVPPSPEEIISASSSSSKCLSTLKDLDTSDRKEDVLSTSKDLLSKPEKMSMQELNPETSTDCDGSHCVAQAGLELLDLSNPPALASPKGWDYSHEPPCLAKTFFFFPQRKILTT

SEQ ID NO: 100094 - protein, 130 aa, Homo sapiens
KTLKSLTSHDPMKQWEVTSRAPPCSGSSITEIINPNYMGVGPFGPPMPLHVKQTLSPDQQPTAWSYDQPPKDSPLGPCRGESPPTPPGQPPISPKKFLPSTANRGLPPRTQESSEALSELPLSREPRGTA

SEQ ID NO: 100095 - protein, 331 aa, Homo sapiens
MEQALAGASSGRELGRPKELQPKKLHLCPLCGKNFSNNSNLIRHQRIHAAERLCMGVDCTEIFGGNPRFLSLHRAHLGEEAHKCLECGKCFSQNTHLTRHQRTHTGEKPYQCNICGKCFSCNSNLHRHQRTHTGEKPYKCPECGEIFAHSSNLLRHQRIHTGERPYKCPECGKSFSRSSHLVIHERTHERERLYPFSECGEAVSDSTPFLTNHGAHKAEKKLFECLTCGKSFRQGMHLTRHQRTHTGEKPYKCTLCGENFSHRSNLIRHQRIHTGEKPYTCHECGDSFSHSSNRIRHLRTHTGERPYKCSECGESFSRSSRLMSHQRTHTG

SEQ ID NO: 100096 - protein, 173 aa, Homo sapiens
MASGRGASSRWFFTREQLENTPSRRCGVEADKELSCRQQAANLIQEMGQRLNVSQLTINTAIVYMHRFYMHHSFTKFNKNIISSTALFLAAKVEEQARKLEHVIKVAHACLHPLEPLLDTKCDAYLQQTQELVILETIMLQTLGFEITIEHPHTDVVKCTQLVRDLWGIARNI

SEQ ID NO: 100097 - protein, 144 aa, Homo sapiens
MTSSHVCCNFLNMWKKSKISTMYYLNQDAKLSNLFLQASSPTTGTAPRSQSRLSVCPSTQDICRICHCEGDEESPLITPCRCTGTLRFVHQSCLHQWIKSSDTRCCELCKYDFIMETKLKPLRKCLCFCLVHEHCLLNGKAMIT

SEQ ID NO: 100098 - protein, 364 aa, Homo sapiens
MNRTAMRASQKDFENSMNQVKLLKKDPGNEVKLKLYALYKQATEGPCNMPKPGVFDLINKAKWDAWNALGSLPKEAARQNYVDLVSSLSPSLESSSQVEPGTDRKSTGFETLVVTSEDGITKIMFNRPKKKNAINTEMYHEIMRALKAASKDDSIITVLTGNGDYYSSGNDLTNFTDIPPGGVEEKAKNNAVLLREFVGCFIDFPKPLIAVVNGPAVGISVTLLGLFDAVYASDRATFHTPFSHLGQSPEGCSSYTFPKIMSPAKATEMLIFGKKLTAGEACAQGLVTEVFPDSTFQKEVWTRLKAFAKLPPNALRISKEVIRKREREKLHAVNAEECNVLQGRWLSDECTNAVVNFLSRKSKL

SEQ ID NO: 100099 - protein, 293 aa, Homo sapiens
MATPLGWSKAGSGSVCLALDQLRDVIESQEELIHQLRNVMVLQDENFVSKEEFQAVEKKLVEEKAAHAKTKVLLAKEEEKLQFALGEVEVLSKQLEKEKLAFEKALSSVKSKVLQESSKKDQLITKCNEIESHIIKQEDILNGKENEIKELQQVISQQKQIFSPPPAGSVAGITCLTSGSRSSRRATWPRCWTRSIRKPQGHVRPAATSIPGKNKMAAAFLFSGCNPQPLPSLLWESPASSPCYFPPSWIVVGVHKVGACSLGEELGLCCLVGTTASFGYLIPSYINSPGYPV

SEQ ID NO: 100100 - protein, 526 aa, Homo sapiens
MAAGGDHGSPDSYRSPLASRYASPEMCFVFSDRYKFRTWRQLWLWLAEAEQTLGLPITDEQIQEMKSNLENIDFKMAAEEEKRLRHDVMAHVHTFGHCCPKAAGIIHLGATSCYVGDNTDLIILRNALDLLLPKLARVISRLADFAKERASLPTLGFTHFQPAQLTTVGKRCCLWIQDLCMDLQNLKRVRDDLRFRGVKGTTGTQASFLQLFEGDDHKVEQLDKMVTEKAGFKRAFIITGQTYTRKVDIEVLSVLASLGASVHKICTDIRLLANLKEMEEPFEKQQIGSSAMPYKRNPMRSERCCSLARHLMTLVMDPLQTASVQWFERTLDDSANRRICLAEAFLTADTILNTLQNISEGLVVYPKVIERRIRQELPFMATENIIMAMVKAGGSRQDCHEKIRVLSQQAASVVKQEGGDNDLIERIQVDAYFSPIHSQLDHLLDPSSFTGRASQQVQRFLEEEVYPLLKPYESVMKCKQVPLDKNVVCVIPCCISNSKSTSDTWQLGSLPASATAPDFLVAWIYS

SEQ ID NO: 100101 - protein, 141 aa, Homo sapiens
CKNELISVKMAEAGSELEGVSLVTGQRGLVLVSALEPLPLPFHQWFLKNYPGSCGLSRKRDWTGSYQIGRGRCKALTGYEPGEKDELNFYQGESIEIIGFVIPGLQWFIGKSTSSGQVGFVPTRNIDPDSYSPMTWCVSSI

SEQ ID NO: 100102 - protein, 706 aa, Homo sapiens
MSVPSSLSQSAINANSHGGPALSLPLPLHAAHNQLLNAKLQATAVGPKDLRSAMGEGGGPEPGPANAKWLKEGQNQLRRAATAHRDQNRNVTLTLAEEASQEPEMAPLGPKGLIHLYSELELSAHNAANRGLRGPGLIISTQEQGPDEGEEKAAGEAEEEEEDDDDEEEEEDLSSPPGLPEPLESVEAPPRPQALTDGPREHSKSASLLFGMRNSAASDEDSSWATLSQGSPSYGSPEDTDSFWNPNAFETDSDLPAGWMRVQDTSGTYYWHIPTGTTQWEPPGRASPSQGSSPQEESQLTWTGFAHGEGFEDGEFWKDEPSDEAPMELGLKEPEEGTLTFPAQSLSPEPLPQEEEKLPPRNTNPGIKCFAVRSLGWVEMTEEELAPGRSSVAVNNCIRQLSYHKNNLHDPMSGGWGEGKDLLLQLEDETLKLVEPQSQALLHAQPIISIRVWGVGRDSGRERDFAYVARDKLTQMLKCHVFRCEAPAKNIATSLHEICSKIMAERRNARCLVNGLSLDHSKLVDVPFQVEFPAPKNELVQKFQVYYLGNVPVAKPVGVDVINGALESVLSSSSREQWTPSHVSVAPATLTILHQQTEAVLGECRVRFLSFLAVGRDVHTFAFIMAAGPASFCCHMFWCEPNAASLSEAVQAACMVEQEELVQARPHPPGPSRGRRRKGLVQAWVPSPCSMGTSAVLISLIKSVCT

SEQ ID NO: 100103 - protein, 57 aa, Homo sapiens
  MOD_RES (1)..(1): Any amino acid
XLYVNGDLRLQQKQPLSCGGLDARYNISVINGTSPFAYDYDLTHIVAAYQERNESSQ

SEQ ID NO: 100104 - protein, 109 aa, Homo sapiens
  MOD_RES (1)..(1): Any amino acid
XSLMDVTEEVWDKTLDINVKAPALMTKAVVPEMEKRGGGSVVIVSSIAAFSPSPGFSPYNVSKTALLGLNNTLAIELAPRNIRVNCLHLDLSRLASAGCSGWTRKKRKA

SEQ ID NO: 100105 - protein, 288 aa, Homo sapiens
MDQNNSLPPYAQGLASPQGAMTPGIPIFSPMMPYGTGLTPQPIQNTNSLSILEEQQRQATQGTSGQAPQLFHSQTLTTAPLPGTTPLYPSPMTPMTPITPATPASESSGIVPQLQNIVSTVNLGCKLDLKTIALRARNAEYNPKRFAAVIMRIREPRTTALIFSSGKMVCTGAKSEEQSRLAARKYARVVQKLGFPAKFLDFKIQNMVGSCDVKFPIRLEGLVLTHQQFSSYEPELFPGLIYRMIKPRIVLLIFVSGKVVLTGAKVRAEIYEAFENIYPILKGFRKTT

SEQ ID NO: 100106 - protein, 49 aa, Homo sapiens
MPQYQTWEEFSRAAEKLYLADPMKARVVLKYRHSDGNLCVKVTDDLVDH

SEQ ID NO: 100107 - protein, 97 aa, Homo sapiens
MMSGEPLHVKTPIRDSMALSKMAGTSVYLKMDSAQPSGSFKIRGIGHFCKRGRPRFHRERAEGDTVGKAGGHRAVSGRRGPAVWSGPGAAGGGLGGR

SEQ ID NO: 100108 - protein, 255 aa, Homo sapiens
  MOD_RES (1)..(1): Any amino acid
XPEAASEPPTGLRFSPEQVACVCEALLQAGHAGRLSRFLGALPPAERLRGSDPVLRARALVAFQRGEYAELYRLLESRPFPAAHHAFLQDLYLRARYHEAERARGRALGAVDKYRLRKKFPLPKTIWDGEETVYCFKERSRAALKACYRGNRYPTPDEKRRLATLTGLSLTQVSNWFKNRRQRDRTGAGGGAPCKRKLPPGQPCVWQPHRDGCGPAAGQDHPHRHLPHQHARLPGPAASPRPGPATEARDGHLRA

SEQ ID NO: 100109 - protein, 1513 aa, Homo sapiens
MRILKRFLACIQLLCVCRLDWANGYYRQQRKLVEEIGWSYTGALNQKNWGKKYPTCNSPKQSPINIDEDLTQVNVNLKKLKFQGWDKTSLENTFIHNTGKTVEINLTNDYRVSGGVSEMVFKASKITFHWGKCNMSSDGSEHSLEGQKFPLEMQIYCFDADRFSSFEEAVKGKGKLRALSILFEVGTEENLDFKAIIDGVESVSRFGKQAALDPFILLNLLPNSTDKYYIYNGSLTSPPCTDTVDWIVFKDTVSISESQLAVFCEVLTMQQSGYVMLMDYLQNNFREQQYKFSRQVFSSYTGKEEIHEAVCSSEPENVQADPENYTSLLVTWERPRVVYDTMIEKFAVLYQQLDGEDQTKHEFLTDGYQDLGAILNNLLPNMSYVLQIVAICTNGLYGKYSDQLIVDMPTDNPELDLFPELIGTEEIIKEEEEGKDIEEGAIVNPGRDSATNQIRKKEPQISTTTHYNRIGTKYNEAKTNRSPTRGSEFSGKGDVPNTSLNSTSQPVTKLATEKDISLTSQTVTELPPHTVEGTSASLNDGSKTVLRSPHMNLSGTAESLNTVSITEYEEESLLTSFKLDTGAEDSSGSSPATSAIPFISENISQGYIFSSENPETITYDVLIPESARNASEDSTSSGSEESLKDPSMEGNVWFPSSTDITAQPDVGSGRESFLQTNYTEIRVDESEKTTKSFSAGPVMSQGPSVTDLEMPHYSTFAYFPTEVTPHAFTPSSRQQDLVSTVNVVYSQTTQPVYNAVPSDPILVETPKVDKISSTMLHLIVSNSASSENMLHSTSVPVFDVSPTSHMHSASLQEASNSSHESRIGLAEGLESEKKAVIPLVIVSALTFICLVVLVGILIYWRKCFQTAHFYLEDSTSPRVISTPPTPIFPISDDVGAIPIKHFPKHVADLHASSGFTEEFETLKEFYQEVQSCTVDLGITADSSNHPDNKHKNRYINIVAYDHSRVKLAQLAEKDGKLTDYINANYVDGYNRPKAYIAAQGPLKSTAEDFWRMIWEHNVEVIVMITNLVEKGRRKCDQYWPADGSEEYGNFLVTQKSVQVLAYYTVRNFTLRNTKIKKGSQKGRPSGRVVTQYHYTQWPDMGVPEYSLPVLTFVRKAAYAKRHAVGPVVVHCSAGVGRTGTYIVLDSMLQQIQHEGTVNIFGFLKHIRSQRNYLVQTEEQYVFIHDTLVEAILSKETEVLDSHIHAYVNALLIPGPAGKTKLEKQFQLLSQSNIQQSDYSAALKQCNREKNRTSSIIPVERSRVGISSLSGEGTDYINASYIMGYYQSNEFIITQHPLLHTIKDFWRMIWDHNAQLVVMIPDGQNMAEDEFVYWPNKDEPINCESFKVTLMAEEHKCLSNEEKLIIQDFILEATQDDYVLEVRHFQCPKWPNPDSPISKTFELISVIKEEAANRDGPMIVHDEHGGVTAGTFCALTTLMHQLEKENSVDVYQVAKMINLMRPGVFADIEQYQFLYKVILSLVSTRQEENPSTSLDSNGAALPDGNIAESLESLV

SEQ ID NO: 100110 - protein, 263 aa, Homo sapiens
MAERQEEQRGSPPLRAEGKADAEVKLILYHWTHSFSSQKVRLVIAEKALKCEEHDVSLPLSEHNEPWFMRLNSTGEVPVLIHGENIICEATQIIDYLEQTFLDERTPRLMPDKESMYYPRVQHYRELLDSLPMDAYTHGCILHPELTVDSMIPAYATTRIRSQIGNTESELKKLAEENPDLQEAYIAKQKRLKSKLLDHDNVKYLKKILDELEKVLDQVETELQRRNEETPASHMQHTGGRTAHLVPKTTVDLAELAALTVYQ

SEQ ID NO: 100111 - protein, 69 aa, Homo sapiens
MLENISHLVSIGKQLCKSVVLSQLEQVEKLSTQRISLLQGREVGIKHQEIPFIQHIYQKGTSTISTMRS

SEQ ID NO: 100112 - protein, 100 aa, Homo sapiens
MTSEFFAAQLRAQISDDTTHPISYYKPEFYTPVDGGTAHLSVVAEDGSAVSATSTINLYFGSKVRSPVSEILFNDEMDDFSSPNITNEFGVPPSPANFIQ

SEQ ID NO: 100113 - protein, 264 aa, Homo sapiens
MSDGLELRPKYNGILHCLTTIWKLDGLRGLYQGVTPNIWGAGLSWGLYFFFYNAIKSYKTEGRAERLEATEYLVSAAEAGAMTLCITNPLWVTKTRLMLQYDAVVNSPHRQYKGMFDTLVKIYKYEGVRGLYKGFVPGLFGTSHGALQFMAYELLKLKYNQHINRLPEAQLSTVEYISVAALSKIFAVAATYPYQVVRARLQDQHMFYSGVIDVITKTWRKEGVGGFYKGIAPNLIRVTPACCITFVVYENVSHFLLDLREKRK

SEQ ID NO: 100114 - protein, 485 aa, Homo sapiens
MVHSSMGAPEIRMSKPLEAEKQGLDSPSEHTDTERNGPDTNHQNPQNKTSPFSVSPTGPSTKVGILSGLHLTFWGPGPCLSPPQIKAEDPSGDSAPAAPLPPQPAQPHLPQAQLMLTGSQLAGDIQQLLQLQQLVLVPGHHLQPPAQFLLPQAQQSQPGLLPTPNLFQLPQQTQGALLTSQPRAGLPTQPPKCLEPPSHPEEPSDLEELEQFARTFKQRRIKLGFTQGDVGLAMGKLYGNDFSQTTISRFEALNLSFKNMCKLKPLLEKWLNDAETMSVDSSLPSPNQLSSPSLGFDGLPGRRRKKRTSIETNVRFALEKSFLANQKPTSEEILLIAEQLHMEKEVIRVWFCNRRQKEKRINPCSAAPMLPSPGKPASYSPHMVTPQGGAGTLPLSQASSSLSTTVTTLSSAVGTLHPSRTAGGGGGGGGAAPPLNSIPSVTPPPPATTNSTNPSPQGSHSAIGLSGLNPSTGPGLWWNPAPYQP

SEQ ID NO: 100115 - protein, 169 aa, Homo sapiens
MIAAPEIPTDFNLLQESETHFSSDTDFEDIEGKNQKQGKGKTCKKGKKGPAEKGKGGNGGGKPPSGPNRMNGHHQQNGVENMMLFEVVKMGKSAMQSVVDDWIESYKHDRDIALLDLINFFIQCSGCKGVVTAEMFRHMQNSEIIRKMTEEFDEDSGDYPLTMAGPQWK

SEQ ID NO: 100116 - protein, 336 aa, Homo sapiens
MADNLDEFIEEQKARLAEDKAELESDPPYMEMKGKLSAKLSENSKILISMAKENIPPNSQQTRGSLGIDYGLSLPLGEDYERKKHKLKEELRQDYRRYLTQERLKLERNKEYNQFLRGKEESSEKFRQVEKSTEPKSQRNKKPIGQVKPDLTSQIQTSCENSEGPRKDVLTPSEAYEELLNQRRLEEDRYRQLDDEIELRNRRIIKKANEEVGISNLKHQRFASKAGIPDRRFHRFNEDRVFDRRYHRPDQDPEVSEEMDERFRYESDFDRRLSRVYTNDSAPDNETSKSANQDTCSPFAGMLFGGEDRELIQRRKEKYRLELLEQMAEQQRNKRR

SEQ ID NO: 100117 - protein, 199 aa, Homo sapiens
MLLLYPREILILDLEVNQTVGVIAIERTGVPFLQVIPCFQRDGLFCLHENGCITLRVRRSYNNIFTTSNEEPDPDPVQELTYDLRSQCDAIRVTKTVRPFSMVCCPVNENAAALVVSDGRVMIWELKSAVCNRNSRNRAKCNCWGRTSQRFNSAGSAPQVPADGTAFRTARTTVCYSYVSTVDHKKHQDVSATAGCWYK

SEQ ID NO: 100118 - protein, 1240 aa, Homo sapiens
MTLDRPGEGATMLKTFTVLLFCIRMSLGMTSIVMDPQPELWIESNYPQAPWENITLWCRSPSRISSKFLLLKDKTQMTWIRPSHKTFQVSFLIGALTESNAGLYRCCYWKETGWSKPSKVLELEAPGQLPKPIFWIQAETPALPGCNVNILCHGWLQDLVFMLFKEGYAEPVDYQVPTGTMAIFSIDNLTPEDEGVYICRTHIQMLPTLWSEPSNPLKLVVAGLYPKPTLTAHPGPIMAPGESLNLRCQGPIYGMTFALMRVEDLEKSFYHKKTIKNEANFFFQSLKIQDTGHYLCFYYDASYRGSLLSDVLKIWVTDTFPKTWLLARPSAVVQMGQNVSLRCRGPVDGVGLALYKKGEDKPLQFLDATSIDDNTSFFLNNVTYSDTGIYSCHYLLTWKTSIRMPSHNTVELMVVDKPPKPSLSAWPSTVFKLGKAITLQCRVSHPVLEFSLEWEERETFQKFSVNGDFIISNVDGKGTGTYSCSYRVETHPNIWSHRSEPLKLMGPAGYLTWNYVLNEAIRLSLIMQLVALLLVVLWIRWKCRRLRIREAWLLGTAQGVTMLFIVTALLCCGLCNGVLIEETEIVMPTPKPELWAETNFPLAPWKNLTLWCRSPSGSTKEFVLLKDGTGWIATRPASEQVRAAFPLGALTQSHTGSYHCHSWEEMAVSEPSEALELVGTDILPKPVISASPTIRGQELQLRCKGWLAGMGFALYKEGEQEPVQQLGAVGREAFFTIQRMEDKDEGNYSCRTHTEKRPFKWSEPSEPLELVIKEMYPKPFFKTWASPVVTPGARVTFNCSTPHQHMSFILYKDGSEIASSDRSWASPGASAAHFLIISVGIGDGGNYSCRYYDFSIWSEPSDPVELVVTEFYPKPTLLAQPGPVVFPGKSVILRCQGTFQGMRFALLQEGAHVPLQFRSVSGNSADFLLHTVGAEDSGNYSCIYYETTMSNRGSYLSMPLMIWVTGLLPKPSLLAQPGPMVAPGENMTLQCQGELPDSTFVLLKEGAQEPLEQQRPSGYRADFWMPAVRGEDSGIYSCVYYLDSTPFAASNHSDSLEIWVTDKPPKPSLSAWPSTMFKLGKDITLQCRGPLPGVEFVLEHDGEEAPQQFSEDGDFVINNVEGKGIGNYSCSYRLQAYPDIWSEPSDPLELVGAAGPVAQECTVGNIVRSSLIVVVVVALGVVLAIEWKKWPRLRTRGSETDGRDQTIALEECNQEGEPGTPANSPSSTSQRISVELPVPI

SEQ ID NO: 100119 - protein, 186 aa, Homo sapiens
MRSLFRCSRTDYKTLDPPPTLKPETQPPEKRRRTIEDFNKFCSFVLAYAGYIPPSKEESDWPASGSSSPLRGESAADSDGWDSAPSDLRTIQTFVKKAKSSKRRAAQAGPTQPGPPRSTFSRLQAPDSATLLEKMKLKDSLFDLDGPKVASPLSPTSLTHTSRPPAALTPVPLSQGDLSHPPRKKD

SEQ ID NO: 100120 - protein, 1444 aa, Homo sapiens
DSGPNKNKKKKKTDFIPYRDSVLTWLLRENLGGNSRTAMVAALSPADINYDETLSTLRYADRAKQIRCNAVINEDPNNKLIRELKDEVTRLRDLLYAQGLGDITDTNTVPGGPKYVSDLENNNLNRGGTVNEAPDPLSTVTNALVGMSPSSSLSALSSRAASVSSLHERILFAPGSEEAIERLKETEKIIAELNETWEEKLRRTEAIRMEREALLAEMGVAMREDGGTLGVFSPKKTPHLVNLNEDPLMSECLLYYIKDGITRVGREDGERRQDIVLSGHFIKEEHCVFRSDSRGGSEAVVTLEPCEGADTYVNGKKVTEPSILRSGNRIIMGKSHVFRFNHPEQARQERERTPCAETPAEPVDWAFAQRELLEKQGIDMKQEMEQRLQELEDQYRREREEATYLLEQQRLDYESKLEALQKQMDSRYYPEVNEEEEEPEDEVQWTERECELALWAFRKWKWYQFTSLRDLLWGNAIFLKEANAISVELKKKVQFQFVLLTDTLYSPLPPDLLPPEAAKDRETRPFPRTIVAVEVQDQKNGATHYWTLEKLRQRLDLMREMYDRAAEVPSSVIEDCDNVVTGGDPFYDRFPWFRLVGRAFVYLSNLLYPVPLVHRVAIVSEKGEVKGFLRVAVQAISADEEAPDYGSGVRQSGTAKISFDDQHFEKFQSESCPVVGMSRSGTSQEELRIVEGQGQGADVGPSADEVNNNTCSAVPPEGLLLDSSEKAALDGPLDAALDHLRLGNTFTFRVTVLQASSISAEYADIFCQFNFIHRHDEAFSTEPLKNTGRGPPLGFYHVQNIAVEVTKSFIEYIKSQPIVFEVFGHYQQHPFPPLCKDVLSPLRPSRRHFPRVMPLSKPVPATKLSTLTRPCPGPCHCKYDLLVYFEICELEANGDYIPAVVDHRGGMPCMGTFLLHQGIQRRITVTLLHETGSHIRWKEVRELVVGRIRNTPETDESLIDPNILSLNILSSGYIHPAQDDRVSLGNDTRTFYQFEAAWDSSMHNSLLLNRVTPYREKIYMTLSAYIEMENCTQPAVVTKDFCMVFYSRDAKLPASRSIRNLFGSGSLRASESNRVTGVYELSLCHVADAGSPGMQRRRRRVLDTSVAYVRGEENLAGWRPRSDSLILDHQWELEKLSLLQEVEKTRHYLLLREKLETAQRPVPEALSPAFSEDSESHGSSSASSPLSAEGRPSPLEAPNERQRELAVKCLRLLTHTFNREYTHSHVCVSASESKLSEMSVTLLRDPSMSPLGVATLTPSSTCPSLVEGRYGATDLRTPQPCSRPASPEPELLPEADSKKLPSPARATETDKEPQRLLVPDIQEIRVSPIVSKKGYLHFLEPHTSGWARRFVVVRRPYAYMYNSDKDTVERFVLNLATAQVEYSEDQQAMLKTPNTFAVCTEHRGILLQAASDKDMHDWLYAFNPLLAGTIRSKLSRRRSAQMRV

SEQ ID NO: 100121 - protein, 172 aa, Homo sapiens
MDQALLLIHNELLWTNLTVYWKSECCYHCLFQVLVNVPQSPKAGKPSAAAASVSTQHGSILQLNDTLEEKEVCRLEYRFGEFGNYSLLVKNIHNGVSEIACDLAVNEDPVDSNLPVSIAFLIGLAVIIVISFLRLLLRVLLCHPGWSAVAPSRLTPSSASRVHTILLPQPPE

SEQ ID NO: 100122 - protein, 90 aa, Homo sapiens
MIFWSFVAGVVTFYCSLGPDSLLPNIFFTIKYKPKLGLQELFPQGHSCAVCGKVKCKRHRPSLLLENYQPWLDLKISSKVDASLSEGCDR

SEQ ID NO: 100123 - protein, 58 aa, Homo sapiens
  MOD_RES (1)..(1): Any amino acid
XMKKMKKSKGLCWAMLITSVSWSYRASRVGWTMQQLLEELPSLAPRKRTDEGRVLSSV

SEQ ID NO: 100124 - protein, 122 aa, Homo sapiens
  MOD_RES (1)..(1): Any amino acid
XIVLHTSYMIYSLAPQYVMYGSQNYLIETNITSDNHKGNSTLSVPKRCDADAPEDQCTVTRTYLFLHKFWFFSAAYYFGNWAFLGVFLIGLIVSCCKGKKSVIEGVDEDSDISDDEPSVYSA

SEQ ID NO: 100125 - protein, 611 aa, Homo sapiens
NKDAVNQMAVCPGNAVEPLPSNSENLQNKETEPTVTTSDAAVDLSSFKNVQHLELPKDQGGLGIAISEEDTLSGVIIKSLTEHGVAATDGRLKVGDQILAVDDEIVVGYPIEKFISLLKTAKMTVKLTIHAENPDSQAVPSAAGAASGEKKNSSQSLMVPQSGSPEPESIRNTSRSSTPAIFASDPATCPIIPGCETTIEISKGRTGLGLSIVGGSDTLLVNGIDLRKATHDEAINVLRQTPQRVRLTLYRDEAPYKEEEVCDTLTIELQKKPGKGLGLSIVGKRNDTGVFVSDIVKGGIADADGRLMQGDQILMVNGEDVRNATQEAVAALLKCSLGTVTLEVGRIKAGPFHSERRPSQSSQVSEGSLSSFTFPLSGSSTSESLESSSKKNALASEIQGLRTVEMKKGPTDSLGISIAGGVGSPLGDVPIFIAMMHPTGVAAQTQKLRVGDRIVTICGTSTEGMTHTQAVNLLKNASGSIEMQVVAGGDVSVVTGHQQEPASSSLSFTGLTSSSIFQDDLGPPQCKSITLERGPDGLGFSIVGGYGSPHGDLPIYVKTVFAKGAASEDGRLKRGDQIIAVNGQSLEGVTHEEAVAILKRTKGTVTLMVLS

SEQ ID NO: 100126 - protein, 754 aa, Homo sapiens
MGSGARFPSGTLRVRWLLLLGLVGPVLGAARPGFQQTSHLSSYEIITPWRLTRERREAPRPYSKQVSYVIQAEGKEHIIHLERNKDLLPEDFVVYTYNKEGTLITDHPNIQNHCHYRGYVEGVHNSSIALSDCFGLRGLLHLENASYGIEPLQNSSHFEHIIYRMDDVYKEPLKCGVSNKDIEKETAKDEEEEPPSMTQLLRRRRAVLPQTRYVELFIVVDKERYDMMGRNQTAVREEMILLANYLDSMYIMLNIRIVLVGLEIWTNGNLINIVGGAGDVLGNFVQWREKFLITRRRHDSAQLVLKKGFGGTAGMAFVGTVCSRSHAGGINVFGQITVETFASIVAHELGHNLGMNHDDGRDCSCGAKSCIMNSGASGSRNFSSCSAEDFEKLTLNKGGNCLLNIPKPDEAYSAPSCGNKLVDAGEECDCGTPKECELDPCCEGSTCKLKSFAECAYGDCCKDCRFLPGGTLCRGKTSECDVPEYCNGSSQFCQPDVFIQNGYPCQNNKAYCYNGMCQYYDAQCQVIFGSKAKAAPKDCFIEVNSKGDRFGNCGFSGNEYKKCATGNALCGKLQCENVQEIPVFGIVPAIIQTPSRGTKCWGVDFQLGSDVPDPGMVNEGTKCGAGKICRNFQCVDASVLNYDCDVQKKCHGHGRDQLWRSYFRKKRSQTYESDGKNQANPSRQPGSVPRHVSPVTPPREVPIYANRFAVPTYAAKQPQQFPSRPPPPQPKVSSQGNLIPARPAPAPPLYSSLT

SEQ ID NO: 100127 - protein, 162 aa, Homo sapiens
MPPEKTKDKGKKGKKDKGPKVPKESLEGSPRPPKKGKEKPPKATKKPKEKPPKATKKPKEKPPKATKKPKEKPPKATKKPPSGKRPPILAPSETLEWPLPPPPSPGPEELPQEGGAPLSNNWQNPGEETHVEAREHQPEPEEETEQPTLDYNDQIEREDYED

SEQ ID NO: 100128 - protein, 679 aa, Homo sapiens
MLLPVFTLKLRHKISPRMVAIGRYDGTHPCLAAATQTGKVFIHNPHTRNQHVSASRVFQSPLESDVSLLSINQAVSCLTAGVLNPELGYDALLVGTQTNLLAYDVYNNSDLFYREVTGDNVNSLALCDFDGDGKKELLVGSEDFDIRVFKEDEIVAEMTETEIVTSLCPMYGSRFGYALSNGTVGVYDKTSRYWRIKSKNHAMSIHAFDLNSDGVNELITGWSNGKVDARSDRTGEVIFKDNFSSAIAGVVEGDYRMDGHIQLICCSVDGEIRGYLPGTAEMRGNLMDTSAEQDLIRELSQKKQNLLLELRNYEENAKAELASPLNEADGHRGIIPANTRLHTTLSVSLGNETQTAHTELRISTSNDTIIRAVLIFAEGIFTGESHVVHPSIHNLSSSICIPIVPPKDVPVDLHLKAFVGYRSSTQFHVFESTRQLPRFSMYALTSLDPASEPISYVNFTIAERAQRVVVWLGQNFLLPEDTHIQNAPFQVCFTSLRNGGHLHIKIKLSGEITINTDDIDLAGDIIQSMASFFAIEDLQVEADFPVYFEELRKVLVKVDEYHSVHQKLSADMADHSNLIRSLLVGAEDARLMRDMKTMKSRYMELYDLNRDLLNGYKIRCNNHTELLGNLKAVNQAIQRAGRLRVGKPKNQVITACRDAIRSNNINTLFKIMRVGTASS

SEQ ID NO: 100129 - protein, 273 aa, Homo sapiens
MAAAALRSGWCRCPRSKSYSSGNRKGFLSGLLDNVKQELAKNKEMKESIKKFRDEARRLEESDVLQEARRKYKTIESETVRTSEVLRKKLGELTGTVKESLHEVSKSDLGRKIKEGVEEAAKTAKQSAESVSKGGEKLGRTAAFRALSQGVESVKKEIDDSVLGQTGPYRRPQRLRKRTEFAGDKFKEEKVFEPNEEALGVVLHKDSKWYQQWKDFKENNVVFNRFFEMKMKYDESDNAFIRASRALTDKVTDLLGGLFSKTEMSEVLTEILR

SEQ ID NO: 100130 - protein, 1130 aa, Homo sapiens
MAERKGTAKVDFLKKIEKEIQQKWDTERVFEVNASNLEKQTSKGKYFVTFPYPYMNGRLHLGHTFSLSKCEFAVGYQRLKGKCCLFPFGLHCTGMPIKSKAAAKAGSSKYQWGIMKSLGLSDEEIVKFSEAEHWLDYFPPLAIQDLKRMGLKVDWRRSFITTDVNPYYDSFVRWQFLTLRERNKIKFGKRYTIYSPKDGQPCMDHDRQTGEGVGPQEYTLLKLKVLEPYPSKLSGLKGKNIFLVAATLRPETMFGQTNCWVRPDMKYIGFETVNGDIFICTQKAARNMSYQGFTKDNGVVPVVKELMGEEILGASLSAPLTSYKVIYVLPMLTIKEDKGTGVVTSVPSDSPDDIAALRDLKKKQALRAKYGIRDDMVLPFEPVPVIEIPGFGNLSAVTICDELKIQSQNDREKLAEAKEKIYLKGFYEGIMLVDGFKGQKVQDVKKTIQKKMIDAGDALIYMEPEKQVMSRSSDECVVALCDQWYLDYGEENWKKQTSQCLKNLETFCEETRRNFEATLGWLQEHACSRTYGLGTHLPWDEQWLIESLSDSTIYMAFYTVAHLLQGGNLHGQAESPLGIRPQQMTKEVWDYVFFKEAPFPKTQIAKEKLDQLKQEFEFWYPVDLRVSGKDLVPNHLSYYLYNHVAMWPEQSDKWPTAVRANGHLLLNSEKMSKSTGNFLTLTQAIDKFSADGMRLALADAGDTVEDANFVEAMADAGILRLYTWVEWVKEMVANWDSLRSGPASTFNDRVFASELNAGIIKTDQNYEKMMFKEALKTGFFEFQAAKDKYRELAVEGMHRELVFRFIEVQTLLLAPFCPHLCEHIWTLLGKPDSIMNASWPVAGPVNEVLIHSSQYLMEVTHDLRLRLKNYMMPAKGKKTDKQPLQKPSHCTIYVAKNYPPWQHTTLSVLRKHFEANNGKLPDNKVIASELGSMPELKKYMKKVMPFVAMIKENLEKMGPRILDLQLEFDEKAVLMENIVYLTNSLELEHIEVKFASEAEDKIREDCCPGKPLNVFRIEPGVSVSLVNPQPSNGHFSTKIEIRQGDNCDSIIRRLMKMNRGIKDLSKVKLMRFDDPLLGPRRVPVLGKEYTEKTPISEHAVFNVDLMSKKIHLTENGIRVDIGDTIIYLVH

SEQ ID NO: 100131 - protein, 164 aa, Homo sapiens
MSEEAEVDVRERETQRDREPKRARDLTLRDSCTDNSMQFGTRTTTAEPGFMGTWQNADTNLLFRMSQQAIRCTLVNCTCECFQPGKINLRTCDQCKHGWVAHALDKLSTQHLYHPTQVEIVQSNVVFDISSLMLYGTQAVPVRLKILLDRLFSVLKQEEVLHIL

SEQ ID NO: 100132 - protein, 283 aa, Homo sapiens
DDRVYPNSTCKPRIIAPSRGSPLPVLSWANREEVWKIMLNKEKTYLRDQHFLEQHPLLQPKMRAILLDWLMEVCEVYKLHRETFYLAQDFFDRYMATQENVVKTLLQLIGISSLFIAAKLEEIYPPKLHQFAYVTDGACSGDEILTMELMIMKLLDLCVLDVDCLEFPYGILAASALYHFSSSELMQKVSGYQWCDIENCVKWMVPFAMVIRETGSSKLKHFRGVADEDAHNIQTHRDSLDLLDKARAKKAMLSEQNRASPLPSGLLTPPQSGKKQSSGPEMA

SEQ ID NO: 100133 - protein, 584 aa, Homo sapiens
MVKIVTVKTQAYQDQKPGTSGLRKRVKVFQSSANYAENFIQSIISTVEPAQRQEATLVVGGDGRFYMKEAIQLIARIAAANGIGRLVIGQNGILSTPAVSCIIRKIKAIGGIILTASHNPGGPNGDFGIKFNISNGGPAPEAITDKIFQISKTIEEYAVCPDLKVDLGVLGKQQFDLENKFKPFTVEIVDSVEAYATMLRSIFDFSALKELLSGPNRLKIRIDAMHGVVGPYVKKILCEELGAPANSAVNCVPLEDFGGHHPDPNLTYAADLVETMKSGEHDFGAAFDGDGDRNMILGKHGFFVNPSDSVAVIAANIFSIPYFQQTGVRGFARSMPTSGALDRVASATKIALYETPTGWKFFGNLMDASKLSLCGEESFGTGSDHIREKDGLWAVLAWLSILATRKQSVEDILKDHWQKYGRNFFTRYDYEEVEAEGANKMMKDLEALMFDRSFVGKQFSANDKVYTVEKADNFEYSDPVDGSISRNQGLRLIFTDGSRIVFRLSGTGSAGATIRLYIDSYEKDVAKINQDPQTGSHSVAQAGVQWHNLSSLQHPPSGLKQSSYLSYLSSSDYRSCWPPLFPLL

SEQ ID NO: 100134 - protein, 141 aa, Homo sapiens
MLLLRCQLKQAPPQKTVVAYNWKTGNVVKRFKGHEHEITKVACIPKSSQFFSASRDRMVMMWDLHGSSQPRQQLCGHAMVVTGLAVSPDSSQLCTGSRDNTLLLWDVVTGQSVERASVSRNVVTHLCWVPREPYILQTSED

SEQ ID NO: 100135 - protein, 279 aa, Homo sapiens
MMAQSNMFTVADVLSQDELRKKLYQTFKDRGILDTLKTQLRNQLIHELMHPVLSGELQPRSISVEGSSLLIGASNSLVADHLQRCGYEYSLSVFFPESGLAKEKVFTMQDLLQLIKINPTSSLYKSLVSGSDKENQKAEKLQLIDDQFADAYPQRIKFESLEIKLNEYKREIEEQLRAEMCQKLKFFKDTEIAKIKMEAKKKYEKELTMFQNDFEKACQAKSEALVLREKSTLERIHKHQEIETKEIYAQRQLLLKDMDLLRGREAELKQRVEAFEFLN

SEQ ID NO: 100136 - protein, 50 aa, Homo sapiens
  MOD_RES (1)..(1): Any amino acid
XKDLPPPQEASATQTWRSVTELKFPLGILIRFFPLESWQIGKIGTVMTFL

SEQ ID NO: 100137 - protein, 111 aa, Homo sapiens
MTFFTHLWDGDPVSQVAGSPTEIPFSSKQEDMSELLDEILVQEILDLNKTTPSEMPSTASTLSTPLHAGIDENYQAGGSENYHELLENLQFSPGIEVKISNDEANANANLH

SEQ ID NO: 100138 - protein, 203 aa, Homo sapiens
MPVTVTRTTITTTTTSSSGLGSPMIVGSPRALTQPLGLLRLLQLVSTCVAFSLVASVGAWTGSMGNWSMFTWCFCFSVTLIILIVELCGLQARFPLSWRNFPITFACYAALFCLSASIIYPTTYVQFLSHGRSRDHAIAATFFSCIACVAYATEVAWTRARPGEITGYMATVPGLLKVLETFVACIIFAFISDPNLYQHQPAL

SEQ ID NO: 100139 - protein, 250 aa, Homo sapiens
MLPAVGSADEEEDPAEEDCPELVPIETTQSEEEEKSGLGAKIPVTIITGYLGAGKTTLLNYILTEQHSKRVAVILNEFGEGSALEKSLAVSQGGELYEEWLELRNGCLCCSVKDSGLRAIENLMQKKGKFDYILLETTGLADPGAVASMFWVDAELGSDIYLDGIITIVDSKYGLKHLTEEKPDGLINEATRQVALADAILINKTDLVPEEDVKKLRTTIRYEMISVLSAYRSMLYTQNIFYSDCCPVET

SEQ ID NO: 100140 - protein, 144 aa, Homo sapiens
  MOD_RES (1)..(1): Any amino acid
XSENLDNPIQTVSLGQSLFFHFPPLLRDGENYVVLLDSTLPRSQYDYILPQVSFTAVGYHKHITLIFNPTRKLPEQDIAQGSYIALPLTLLVLLAGYNHDKLIPLLLQLTSRLQGVRALGQAASDNSGPEDAKRQAKKQKTRRT

SEQ ID NO: 100141 - protein, 1175 aa, Homo sapiens
MALSDEPAAGGPEEEAEDETLAFGAALEAFGESAETRALLGRLREVHGGGAEREVALERFREWMMNLLLDIVQDQTSPASLVHLAFKFLYIITKVRGYKTFLRLFPHEVADVEPVLDLVTIQNPKDHEAWETRYMLLLWLSVTCLIPFDFSRLDGNLLTQPGQARMSIMDRILQIAESYLIVSDKARDAAAVLVSRFITRPDVKQSKMAEFLDWSLCNLARSSFQTMQGVITMDGTLQALAQIFKHGKREDCLPYAATVLRCLDGCRLPESNQTLLRKLGVKLVQRLGLTFLKPKVAAWRYQRGCRSLAANLQLLTQGQSEQKPLILTEDDDEDDDVPEGVERVIEQLLVGLKDKDTVVRWSAAKGIGRMAGRLPRALADDVVGSVLDCFSFQETDKAWHGGCLALAELGRRGLLLPSRLVDVVAVILKALTYDEKRGACSVGTNVRDAACYVCWAFARAYEPQELKPFVTAISSALVIAAVFDRDINCRRAASAAFQENVGRQGTFPHGIDILTTADYFAVGNRSNCFLVISVFIAGFPEYTQPMIDHLVTMKISHWDGVIRELAARALHNLAQQAPEFSATQVFPRLLSMTLSPDLHMRHGSILACAEVAYALYKLAAQENRPVTDHLDEQAVQGLKQIHQQLYDRQLYRGLGGQLMRQAVCVLIEKLSLSKMPFRGDTVIDGWQWLINDTLRHLHLISSHSRQQMKDAAVSALAALCSEYYMKEPGEADPAIQEELITQYLAELRNPEEMTRCGFSLALGALPGFLLKGRLQQVLTGLRAVTHTSPEDVSFAESRRDGLKAIARICQTVGVKAGAPDEAVCGENVSQIYCALLGCMDDYTTDSRGDVGTWVRKAAMTSLMDLTLLLARSQPELIEAHTCERIMCCVAQQASEKIDRFRAHAASVFLTLLHFDSPPIPHVPHRGELEKLFPRSDVASVNWSAPSQAFPRITQLLGLPTYRYHVLLGLVVSLGGLTESTIRHSTQSLFEYMKGIQSDPQALGSFSGTLLQIFEDNLLNERVSVPLLKTLDHVLTHGCFDIFTTEEDHPFAVKLLALCKKEIKNSKDIQKLLSGIAVFCEMVQFPGDVRRQALLQLCLLLCHRFPLIRKTTASQVYETLLTYSDVVGADVLDEVVTVLSDTAWDAELAVVREQRNRLCDLLGVPRPQLVPQPGAC

SEQ ID NO: 100142 - protein, 188 aa, Homo sapiens
MGLAMEHGGSYARAGGSSRGCWYYLRYFFLFVSLIQFLIILGLVLFMVYGNVHVSTESNLQATERRAEGLYSQLLGLTASQSNLTKELNFTTRAKDAIMQMWLNARRDLDRINASFRQCQGDRVIYTNNQRYMAAIILSEKQCRDQFKDMNKSCDALLFMLNQKVKTLEVEIAKLQAECSRQTQLALE

SEQ ID NO: 100143 - protein, 171 aa, Homo sapiens
MAAPSWRGARLVQSVLRVWQVGPHVARERVIPFSSLLGFQRRCVSCVAGSAFSGPRLASASRSNGQGSALDHFLGFSQPDSSVTPCVPAVSMNRDEQDVLLVHHPDMPENSRVLRVVLLGAPNAGKSTLSNQLLGRKVFPVSRKVHTTRCQALGVITEKETQVVGTYKGSP

SEQ ID NO: 100144 - protein, 57 aa, Homo sapiens
MSEKENNFPPLPKFIPVKPCFYQNFSDEIPVEHQVLVKRIYRLWMFYCATLGVNLIA

SEQ ID NO: 100145 - protein, 160 aa, Homo sapiens
MLWPRNLTSWDDSSSVSSGISDTIDNLSTDDINTSSSISSYANTPASSRKNLDVQTDAEKHSQVERNSLWSGDDVKKSDGGSDSGIKMEPGSKWRRNPSDVSDESDKSTSGKKNPVISQTGSWRRGMTAQVGITMPRTKPSAPAGALKTPGTGKTDDAKV

SEQ ID NO: 100146 - protein, 126 aa, Homo sapiens
MTEMSFLSSEVLVGDLMSPFDQSGLGAEESLGLLDDYLEVAKHFKPHGFSSDKAKAGSSEWLAVDGLVSPSNNSKEDAFSGTDWMLEKMDLKEFDLDALLGIDDLETMPDDLLTTLDDTCDLFAPL

SEQ ID NO: 100147 - protein, 157 aa, Homo sapiens
MMDLRNTPAKSLDKFIEDYLLPDTCFRMQINHAIDIICGFLKERCFRGSSYPVCVSKVVKGGSSGKGTTLRGRSDADLVVFLSPLTTFQDQLNRRGEFIQEIRRQLEACQRERAFSVKFEVQAPRWGNPRALSFVLSSLQLGEGVEFDVLPAFDALV

SEQ ID NO: 100148 - protein, 212 aa, Homo sapiens
MAMQKIFAREILDSRGNPTVEVDLHTAKGRFRAAVPSGASTGIYEALELRDGDKGRYLGKGVLKAVENINNTLGPALLQKKLSVVDQEKVDKFMIELDGTENKSKFGANAILGVSLAVCKAGAAEKGVPLYRHIADLAGNPDLILPVPAFNVINGGSHAGNKLAMQEFMILPVGASSFKEAMRIGAEVYHHLKGVIKAKYGKDATNVGDEGG

SEQ ID NO: 100149 - protein, 1629 aa, Homo sapiens
MDLTAYAELLKESGNQVLKNGNFSLAIRKYDEAIQILLQLYQWGVPPRDLAVLLCNKSNAFFSLGKWNEAFVAAKECLQWDPTYVKGYYRAGYSLLRLHQPYEAARMFFEGLRLVQRSQDQAPVADFLVGVFTTMSSDSIVLQSFLPCFDHIFTTGFPTEVWQSVIEKLAKKGLWHSFLLLSAKKDRLPRNIHVPELSLKSLFEKYVFIGLYEKMEQVPKLVQWLISIGASVETIGPYPLHALMRLCIQARENHLFRWLMDHKPEWKGRINQKDGDGCTVLHVVAAHSPGYLVKRQTEDVQMLLRFGADPTLLDRQSRSVVDVLKRNKNFKAIEKINSHLEKLATCSKDLSGFSNGDGPTSENDIFRKVLEQLVKYMNSGNRLLHKNFLKQEVVQRFLRLLSTLQEIPPDLVCDINQDCATTVFKFLLEKQRWPEVLLLLTRKVSGEPPLGDCLIKDCNFSDLDICTIIPHLSTWDQRKKQLLGCLIDSGALPDGLQESQERPVVTCLKHEDFELAFLLLTKGADPRAISLTEGDTPLHAALHIFLEIKADIGFSFLSHLLDLFWSNPTEFDYLNPNVQDSNGNTLMHILFQKGMLKRVKKLLDLLVKFDINFNLKNKEGKDARHRIKKNDSLLLAWNKALMENRRRSRQDSAAHLGKLSKSTAPGHTSQLKSQGSFKSVPCGATARTLPEGSAVPDSWETLPGTQVTRKEPGALRPCSLRDCLMQDITVLIQQVEVDPSFPEDCLQSSEPLEAGAGKEGKKDDKPTLGAGAPDCSEVGEGHAQVGLGALQLVPDDNRGKEGNDDQDDWSTQEIEACLQDFDNMTWEIECTSEMLKKLSSKVMTKVIKKKIILAIQQLGNGEWTQGLQKRLKHLKGSIQLFEAKLDKGARMLWELAIDFSPRCSENPEKIIATEQNTCAMEKSGRIYTEIIRIWDIVLDHCKLADSIKAICNAYNRGLSCVLRKKLKGINKGQVSANMKIQKRIPRCYVEDTEAEKGREHVNPEYFPPASAVETEYNIMKFHSFSTNMAFNILNDTTATVEYPFRVGELEYAVIDLNPRPLEPIILIGRSGTGKTTCCLYRLWKKFHVYWEKAEQAGSPLLAKQVWLKRRLEVEPGKESPGGEEEEEEEDEEEEDSIEVETVESIDEQEYEACAGGAGVEPAGDGQAAEVCAPEHPHQLEHLHQIFVTKNHVLCQEVQRNFIELSKSTKATSHYKPLDPNIHKLQDLRDENFPLFVTSKQLLLLLDASLPKPFFLRNEDGSLKRTIIGWSAQEESTIPSWQEDEEEAEVDGDYSEEDKAVEMRTGDSDPRVYVTFEVFKNEIWPKMTKGRTAYNPALIWKEIKSFLKGSFEALSCPHGRLTEEVYKKLGRKRCPNFKEDRSEIYSLFSLYQQIRSQKGYFDEEDVLYNISRRLSKLRVLPWSIHELYGDEIQDFTQAELALLMKCINDPNSMFLTGDTAQSIMKGVAFRFSDLRSLFHYASRNTIDKQCAVRKPKKIHQLYQNYRSHSGILNLASGVVDLLQFYFPESFDRLPRDSGLFDGPKPTVLESCSVSDLAILLRGNKRKTQPIEFGAHQVILVANETAKEKIPEELGLALVLTIYEAKGLEFDDVLLYNFFTDSEGCPSWSKL

SEQ ID NO: 100150 - protein, 86 aa, Homo sapiens
  MOD_RES (1)..(1): Any amino acid
XRSPRHEKKKKVRKYWDVPPPGFEHITPMQYKAMQAAGQIPATALLPTMTPDGLAVTPTPVPVVGSQMTRQARRLYVGNIPFGITE

SEQ ID NO: 100151 - protein, 1613 aa, Homo sapiens
MTDRFWDQWYLWYLRLLRLLDRGSFRNDGLKASDVLPILKEKVAFVSGGRDKRGGPILTFPARSNHDRIRQEDLRKLVTYLASVPSEDVCKRGFTVIIDMRGSKWDLIKPLLKTLQEAFPAEIHVALIIKPDNFWQKQKTNFGSSKFIFETSMVSVEGLTKLVDPSQLTEEFDGSLDYNHEEWIELRLSLEEFFNSAVHLLSRLEDLQEMLARKEFPVDVEGSRRLIDEHTQLKKKVLKAPVEELDREGQRLLQCIRCSDGFSGRNCIPGSADFQSLVPKITSLLDKLHSTRQHLHQMWHVRKLKLDQCFQLRLFEQDAEKMFDWISHNKELFLQSHTEIGVSYQYALDLQTQHNHFAMNSMNAYVNINRIMSVASRLSEAGHYASQQIKQISTQLDQEWKSFAAALDERSTILAMSAVFHQKAEQFLSGVDAWCKMCSEGGLPSEMQDLELAIHHHQTLYEQVTQAYTEVSQDGKALLDVLQRPLSPGNSESLTATANYSKAVHQVLDVVHEVLHHQRRLESIWQHRKVRLHQRLQLCVFQQDVQQVLDWIENHGEAFLSKHTGVGKSLHRARALQKRHDDFEEVAQNTYTNADKLLEAAEQLAQTGECDPEEIYKAARHLEVRIQDFVRRVEQRKLLLDMSVSFHTHTKELWTWMEDLQKEMLEDVCADSVDAVQELIKQFQQQQTATLDATLNVIKEGEDLIQQLRSAPPSLGEPSEARDSAVSNNKTPHSSSISHIESVLQQLDDAQVQMEELFHERKIKLDIFLQLRIFEQYTIEVTAELDAWNEDLLRQMNDFNTEDLTLAEQRLQRHTERKLAMNNMTFEVIQQGQDLHQYITEVQASGIELICEKDIDLAAQVQELLEFLHEKQHELELNAEQTHKRLEQCLQLRHLQAEVKQVLGWIRNGESMLNASLVNASSLSEAEQLQREHEQFQLAIESLFHATSLQKTHQSALQVQQKAEVLLQAGHYDADAIRECAEKVALHWQQLMLKMEDRLKLVNASVAFYKTSEQACTLARRNAEVFLKYIHRNNVSMPSVASHTRGPEQQVKAILSELLQRENRVLHFWTLKKRRLDQCQQYVVFERSAKQALDWIQETGEFYLSTHTSTGETTEETQELLKEYGEFRVPAKQTKEKVKLLIQLADSFVEKGHIHATEIRKWVTTVDKHYRDFSLRMGKYRYSLEKALGVNTEDNKDLELDIIPASLSDREVKLRDANHEVNEEKRKSARKKEFIMAELLQTEKAYVRDLHECLETYLWEMTSGVEEIPPGILNKEHIIFGNIQEIYDFHNNIFLKELEKYEQLPEDVGHCFVTWADKFQMYVTYCKNKPDSNQLILEHAGTFFDEIQQRHGLANSISSYLIKPVQRITKYQLLLKELLTCCEEGKGELKDGLEVMLSVPKKANDAMHVSMLEGFDENLDVQGELILQDAFQVWDPKSLIRKGRERHLFLFEISLVFSKEIKDSSGHTKYVYKNKLLTSELGVTEHVEGDPCKFALWSGRTPSSDNKTVLKASNIETKQEWIKNIREVIQERIIHLKGALKEPLQLPKTPAKQRNNSKRDGVEDIDSQGDGSSQPDTISIASRTSQNTVDSDKDGNLVPRWHLGPGDPFSTYV

SEQ ID NO: 100152 - protein, 253 aa, Homo sapiens
MATVMAATAAERAVLEASLRFTLPGSGTEGPAKQENFILGSCGTDQVKGVLTLQGDALSQADVNLKMPRNNQLLHFAFREDKQWKLQQIQDARNHVSQAIYLLTSRDQSYQFKTGAEVLKLMDAVMLQLTRARNRLTTPATLTLPEIAASGLTRMFAPALPSDLLVNVYINLNKLCLTVYQLHALQPNSTKNFRPAGGAVLHSPGAMFEWGSQRLEVSHVHKVECVIPWLNDALVYFTVSLQLCQQLKDKVGP

SEQ ID NO: 100153 - protein, 174 aa, Homo sapiens
MPPYTVVYFPVRGRCAALRMLLADQGQSWKEEVVTVETWQEGSLKASCLYGQLPKFQDGDLTLYQSNTILRHLGRTLGLYGKDQQEAALVDMVNDGVEDLRCKYISLIYTNYISFADYNLLDLLLIHEVLAPGCLDAFPLLSAYVGRLSARPKLKAFLASPEYVNLPINGNGKQ

SEQ ID NO: 100154 - protein, 109 aa, Homo sapiens
MAAIRKKLVIVGDGACGKTCLLIVFSKDQFPEVYVPTVFENYVADIEVDGKQEPVKPEEGRDMANRIGAFGYMECSAKTKDGVREVFEMATRAALQARRGKKKSGCLVL

SEQ ID NO: 100155 - protein, 149 aa, Homo sapiens
MPAVLGFEGSANKIGVGVVRDGKVLANPRRTYVTPPGTGFLPGDTARHHRAVILDLLQEALTESGLTSQDIDCIAYTKGPGMGAPLVSVAVVARTVAQLWNKPLVGVNHCIGHIEMGRLITGATSPTVLYVIAYSEHRYRIFGETIDIA

SEQ ID NO: 100156 - protein, 96 aa, Homo sapiens
MFAGLDLNSSDNQSGGSTASKGRYIPPHLRNREATKGFYDKDSSGWSSSKDKDAYSSFGSRSDSRGKSSFFSDRGSGSRGRFDDRGRSDYDGIGSR

SEQ ID NO: 100157 - protein, 278 aa, Homo sapiens
MAPWPPKGLVPAMLWGLSLFLNLPGPIWLQPSPPPQSSPPPQPHPCHTCRGLVDSFNKGLERTIRDNFGGGNTAWEEENLSKYKDSETRLVEVLEGVCSKSDFECHRLLELSEELVESWWFHKQQEAPDLFQWLCSDSLKLCCPAGTFGPSCLPCPGGTERPCGGYGQCEGEGTRGGSGHCDCQAGYGGEACGQCGLGYFEAERNASHLVCSACFGPCARCSGPEESNCLQCKKGWALHHLKCVDCAKACLGCMGAGPGRCKKCSPGYQQVGSKCLGL

SEQ ID NO: 100158 - protein, 72 aa, Homo sapiens
MAKRTKKVGIVGKYGTRYGASLRKMVKKIEISQHAKYTCSFCGKTKMKRRAVGIWHCGSCMKTVAGGAWTYK

SEQ ID NO: 100159 - protein, 1736 aa, Homo sapiens
MERCSRCHRLLLLLPLVLGLSAAPGWAGAPPVDVLRALRFPSLPDGVRRAKGICPADVAYRVARPAQLSAPTRQLFPGGFPKDFSLLTVVRTRPGLQAPLLTLYSAQGVRQLGLELGPPVRFLYEDQTGRPQPPSQPVFRGLSLADGKWHRVAVAVKGQSVTLIVDCKKRVTRPLPRSARPVLDTHGVIIFGARILDEEVFEGDVQELAIVPGVQAAYESCEQKELECEGGQRERPQNQQPHRAQRSPQQQPSRLHRPQNQEPQSQPTESLYYDYKPPYYDVMTTGTTPDYQDPTPGEEEEILESSLLPPLEEEQTDLQVPPTADRFQAEEYGEGGTDPPEGPYDYTYGYGDDYREETELGPALSAETAHSGAAAHGPRGLKGEKGEPAVLEPGMLVEGPPGPEGPAGLIGPPGIQGNPGPVGDPGERGPPGRAGLPGSDGAPGPPGTSLMLPFRFGSGGGDKGPVVAAQEAQAQAILQQARLALRGPPGPMGYTGRPGPLGQPGSPGLKGESGDLGPQGPRGPQGLTGPPGKAGRRGRAGADGARGMPGDPGVKGDRGFDGLPGLPGEKGHRGDTGAQGLPGPPGEDGERGDDGEIGPRGLPGESGPRGLLGPKGPPGIPGPPGVRGMDGPQGPKGSLGPQGEPGPPGQQGTPGTQGLPGPQGAIGPHGEKGPQGKPGLPGMPGSDGPPGHPGKEGPPGTKGNQGPSGPQGPLGYPGPRGVKGVDGIRGLKGHKGEKGEDGFPGFKGDIGVKGDRGEVGVPGSRGEDGPEGPKGRTGPTGDPGPPGLMGEKGKLGVPGLPGYPGRQGPKGSLGFPGFPGASGEKGARGLSGKSGPRGERGPTGPRGQRGPRGATGKSGAKGTSGGDGPHGPPGERGLPGPQGPNGFPGPKGPPGPPGKDGLPGHPGQRGEVGFQGKTGPPGPPGVVGPQGAAGETGPMGERGHPGPPGPPGEQGLPGTAGKEGTKGDPGPPGAPGKDGPAGLRGFPGERGLPGTAGGPGLKGNEGPSGPPGPAGSPGERGAAGSGGPIGPPGRPGPQGPPGAAGEKGVPGEKGPIGPTGRDGVQGPVGLPGPAGPPGVAGEDGDKGEVGDPGQKGTKGNKGEHGPPGPPGPIGPVGQPGAAGADGEPGARGPQGHFGAKGDEGTRGFNGPPGPIGLQGLPGPSGEKGETGDVGPMGPPGPPGPRGPAGPNGADGPQGPPGGVGNLGPPGEKGEPGESGSPGIQGEPGVKGPRGERGEKGESGQPGEPGPPGPKGPTGDDGPKGNPGPVGFPGDPGPPGEGGPRGQDGAKGDRGEDGEPGQPGSPGPTGENGPPGPLGKRGPAGSPGSEGRQGGKGAKGDPGAIGAPGKTGPVGPAGPAGKPGPDGLRGLPGSVGQQGRPGATGQAGPPGPVGPPGLPGLRGDAGAKGEKGHPGLIGLIGPPGEQGEKGDRGLPGPQGSPGQKGEMGIPGASGPIGPGGPPGLPGPAGPKGAKGATGPGGPKGEKGVQGPPGHPGPPGEVIQPLPIQMPKKTRRSVDGSRLMQEDEAIPTGGAPGSPGGLEEIFGSLDSLREEIEQMRRPTGTQDSPARTCQDLKLCHPELPDGEYWVDPNQGCARDAFRVFCNFTAGGETCVTPRDDVTQFSYVDSEGSPVGVVQLTFLRLLSVSAHQDVSYPCSGAARDGPLRLRGANEDELSPETSPYVKEFRDGCQTQQGRTVLEVRTPVLEQLPVLDASFSDLGAPPRRGGVLLGPVCFMG

SEQ ID NO: 100160 - protein, 137 aa, Homo sapiens
MSVLLRSGLGPLCAVARAAIPFIWRGKYFSSGNEPAENPVTPMLRHLMYKIKSTGPITVAEYMKEVLTNPAKGYYVYRDMLGEKGDFITSPEISQIFGELLGIWFISEWMATGKSTAFQLVELGPGVHSTWICAEKL

SEQ ID NO: 100161 - protein, 103 aa, Homo sapiens
  MOD_RES (1)..(1): Any amino acid
XSELRLILRQPSPLWLSFTVEELQIYQQGPKSPSVTFPKWLSHPVPCEQPALLREGLPDPSRVSSEVQQMWALTEMIRASHTSARIGRFDVDGCYDLNLLSYT

SEQ ID NO: 100162 - protein, 568 aa, Homo sapiens
MLGQKPKTNIAIFCETRAEWMIAAQACFMYNFQLVTLYATLGGPAIVHALNETEVTNIITSKELLQTKLKDIVSLVPRLRHIITVDGKPPTWSEFPKGIIVHTMAAVEALGAKASMENQPHSKPLPSDIAVIMYTSGSTGLPKGVMISHSNIIAGITGMAERIPELGEEDVYIGYLPLAHVLELSAELVCLSHGCRIGYSSPQTLADQSSKIKKGSKGDTSMLKPTLMAAVPEIMDRIYKNVMNKVSEMSSFQRNLFILAYNYKMEQISKGRNTPLCDSFVFRKVRSLLGGNIRLLLCGGAPLSATTQRFMNICFCCPVGQGYGLTESAGAGTISEVWDYNTGRVGAPLVCCEIKLKNWEEGGYFNTDKPHPRGEILIGGQSVTMGYYKNEAKTKADFFEDENGQRWLCTGDIGEFEPDGCLKIIDRKKDLVKLQAGEYVSLGKVEAALKNLPLVDNICAYANSYHSYVIGFVVPNQKELTELARKKGLKGTWEELCNSCEMENEVLKVLSEAAISASLEKFEIPVKIRLSPEPWTPETGLVTDAFKLKRKELKTHYQADIERMYGRK

SEQ ID NO: 100163 - protein, 131 aa, Homo sapiens
MAVTKELLQMDLYALLGIEEKAADKEVKKAYRQKALSCHPDKNPDNPRAAELFHQLSQALEVLTDAAARAAYDKVRKAKKQAAERTQKLDEKRKKVKLDLEARERQAQAQESEEEEESRSTRTLEQEVAEP

SEQ ID NO: 100164 - protein, 159 aa, Homo sapiens
MIRHAGAPARGDPTGPVPVVGKGEEEEEEDGMRLCLPANPKNCLPHRRGISILEKLIKTCPVWLQLSLGQAEVARILHRVVAGMFLVRRDSSSKQLVLCVHFPSLNESSAEVLEYTIKEEKSKTYCPSHCGYPRPSLRPAASRTLRPSPTWVWVSGTPR

SEQ ID NO: 100165 - protein, 250 aa, Homo sapiens
MGPEALSSLLLLLLVASGDADMKGHFDPAKCRYALGMQDRTIPDSDISASSSWSDSTAARHSRLESSDGDGAWCPAGSVFPKEEEYLQVDLQRLHLVALVGTQGRHAGGLGKEFSRSYRLRYSRDGRRWMGWKDRWGQEVISGNEDPEGVVLKDLGPPMVARLVRFYPRADRVMSVCLRVELYGCLWRDGLLSYTAPVGQTMYLSEAVYLNDSTYDGHTVGGLQYGGLGQLADGVVGLDDFRKSQELRVW

SEQ ID NO: 100166 - protein, 402 aa, Homo sapiens
MEKKWKYCAVYYIIQIHFVKGVWEKTVNTEENVYATLGSDVNLTCQTQTVGFFVQMQWSKVTNKIDLIAVYHPQYGFYCAYGRPCESLVTFTETPENGSKWTLHLRNMSCSVSGRYECMLVLYPEGIQTKIYNLLIQTHVTADEWNSNHTIEIEINQTLEIPCFQNSSSKISSEFTYAWSVEDNGTQETLISQNHLISNSTLLKDRVKLGTDYRLHLSPVQIFDDGRKFSCHIRVGPNKILRSSTTVKVFAKPEIPVIVENNSTDVLVERRFTCLLKNVFPKANITWFIDGSFLHDEKEGIYITNEERKGKDGFLELKSVLTRVHSNKPAQSDNLTIWCMALSPVPGNKVWNISSEKITFLLGSEISSTDPPLSVTESTLDTQPSPASSVSPASKNVFTLSY

SEQ ID NO: 100167 - protein, 326 aa, Homo sapiens
MAAAAAAAAATNGTGGSSGMEVDAAVPSVMACGVTGSVSVALHPLVILNISDHWIRMRSQEGRPVQVIGALIGKQEGRNIEVMNSFELLSHTVEEKIIIDKEYYYTKEEQFKQVFKELEFLGWYTTGGPPDPSDIHVHKQVCEIIESPLFLKLNPMTKHTDLPVSVFESVIDIINGEATMLFAELTYTLATEEAERIGVDHVARMTATGSGENSTVAEHLIAQHSAIKMLHSRVKLILEYVKASEAGEVPFNHEILREAYALCHCLPVLSTDKFKTDFYDQCNDVGLMAYLGTITKTCNTMNQFVNKFNVLYDRQGIGRRMRGLFF

SEQ ID NO: 100168 - protein, 284 aa, Homo sapiens
MAPWAEAEHSALNPLRAVWLTLTAAFLLTLLLQLLPPGLLPGCAIFQDLIRYGKTKCGEPSRPAACRAFDVPKRYFSHFYIISVLWNGFLLWCLTQSLFLGAPFPSWLHGLLRILGAAQFQGGELALSAFLVLVFLWLHSLRRLFECLYVSVFSNVMIHVVQYCFGLVYYVLVGLTVLSQVPMDGRNDGVSLCRPDWSAVVGSWLTATSAFWVPAILLCLSLPSSWDYRHMPPCPEEVPYFRLAPGSANYIASNDHNQSSILLLGTWMLELLQSHWAMKIKVTP

SEQ ID NO: 100169 - protein, 149 aa, Homo sapiens
MKILEKKSVEVNFTESLLRMAADDVEEYMIERPEPEFQDLNEKARALKQILSKIPDEINDRVRFLQTIKDIASAIKELLDTVNNVFKKYQYQNRRALEHQKKEFVKYSKSFSDTLKTYFKDGKAINVFVSANRLIHQTNLILQTFKTVA

SEQ ID NO: 100170 - protein, 448 aa, Homo sapiens
MEMTEMTGVSLKRGALVVEDNDSGVPVEETKKQKLSECSLTKGQDGLQNDFLSISEDVPRPPDTVSTGKGGKNSEAQLEDEEEEEEDGLSEECEEEESESFADMMKHGLTEADVGITKFVSSHQGFSGILKERYSDFVVHEIGKDGRISHLNDLSIPVDEEDPSEDIFTVLTAEEKQRLEELQLFKNKETSVAIEVIEDTKEKRTIIHQAIKSLFPGLETKTEDREGKKYIVAYHAAGKKALANPRKHSWPKSRGSYCHFVLYKENKDTMDAINVLSKYLRVKPNIFSYMGTKDKRAITVQEIAVLKITAQRLAHLNKCLMNFKLGNFSYQKNPLKLGELQGNHFTVVLRNITGTDDQVQQAMNSLKEIGFINYYGMQRFGTTAVPTYQVGRAILQNSWTEVMDLILKPRSGAEKGYLVKCREEWAKTKDPTAALRKLPVKRYPEIIA

SEQ ID NO: 100171 - protein, 347 aa, Homo sapiens
MAEAVFHAPKRKRRVYETYESPLPIPFGQDHGPLKEFKIFRAEMINNNVIVRNAEDIEQLYGKGYFGKGILSRSRPSFTISDPKLVAKWKDMKTNMPIITSKRYQHSVEWAAELMRRQGQDESTVRRILKDYTKPLEHPPVKRNEEAQVHDKLNSGMVSNMEGTAGGERPSVVNGDSGKSGGVGDPREPLGCLQEGSGCHPTTESFEKSVREDASPLPHVCCCKQDALILQRGLHHEDGSQHIGLLHPGDRGPDHEYVLVEEAECAMSEREAAPNEEAFFLVYALGCLSIYYEKEPLTIVKLWKAFTVVQPTFRTTYMAYHYFRSKGWVPKVGLKYGTDLLILSLSS

SEQ ID NO: 100172 - protein, 36 aa, Homo sapiens
  MOD_RES (1)..(1): Any amino acid
XKFLHDNMVEIPNRIMFSEMKRVTHLSCPSESFGLG

SEQ ID NO: 100173 - protein, 76 aa, Homo sapiens
MALDPADFTKCCKNSGVLMVVKCRKENSALKECLTAYYNDPAFYEECKMEYLKEREEFRKTGIPTKKRLQKLPTSM

SEQ ID NO: 100174 - protein, 3576 aa, Homo sapiens
MSEPGGGGGEDGSAGLEVSAVQNVADVSVLQKHLRKLVPLLLEDGGEAPAALEAALEEKSALEQMRKFLSDPQVHTVLVERSTLKEDVGDEGEEEKEFISYNINIDIHYGVKSNSLAFIKRTPVIDADKPVSSQLRVLTLSEDSPYETLHSFISNAVAPFFKSYIRESGKADRDGDKMAPSVEKKIAELEMGLLHLQQNIEIPEISLPIHPMITNVAKQCYERGEKPKVTDFGDKVEDPTFLNQLQSGVNRWIREIQKVTKLDRDPASGTALQEISFWLNLERALYRIQEKRESPEVLLTLDILKHGKRFHATVSFDTDTGLKQALETVNDYNPLMKDFPLNDLLSATELDKIRQALVAIFTHLRKIRNTKYPIQRALRLVEAISRDLSSQLLKVLGTRKLMHVAYEEFEKVMVACFEVFQTWDDEYEKLQVLLRDIVKRKREENLKMVWRINPAHRKLQARLDQMRKFRRQHEQLRAVIVRVLRPQVTAVAQQNQGEVPEPQDMKVAEVLFDAADANAIEEVNLAYENVKEVDGLDVSKEGTEAWEAAMKRYDERIDRVETRITARLRDQLGTAKNANEMFRIFSRFNALFVRPHIRGAIREYQTQLIQRVKDDIESLHDKFKVQYPQSQACKMSHVRDLPPVSGSIIWAKQIDRQLTAYMKRVEDVLGKGWENHVEGQKLKQDGDSFRMKLNTQEIFDDWARKVQQRNLGVSGRIFTIESTRVRGRTGNVLKLKVNFLPEIITLSKEVRNLKWLGFRVPLAIVNKAHQANQLYPFAISLIESVRTYERTCEKVEERNTISLLVAGLKKEVQALIAEGIALVWESYKLDPYVQRLAETVFNFQEKVDDLLIIEEKIDLEVRSLETCMYDHKTFSEILNRVQKAVDDLNLHSYSNLPIWVNKLDMEIERILGVRLQAGLRAWTQVLLGQAEDKAEVDMDTDAPQVSHKPGGEPKIKNVVHELRITNQVIYLNPPIEECRYKLYQEMFAWKMVVLSLPRIQSQRYQVGVHYELTEEEKFYRNALTRMPDGPVALEESYSAVMGIVSEVEQYVKVWLQYQCLWDMQAENIYNRLGEDLNKWQALLVQIRKARGTFDNAETKKEFGPVVIDYGKVQSKVNLKYDSWHKEVLSKFGQMLGSNMTEFHSQISKSRQELEQHSVDTASTSDAVTFITYVQSLKRKIKQFEKQVELYRNGQRLLEKQRFQFPPSWLYIDNIEGEWGAFNDIMRRKDSAIQQQVANLQMKIVQEDRAVESRTTDLLTDWEKTKPVTGNLRPEEALQALTIYEGKFGRLKDDREKCAKAKEALELTDTGLLSGSEERVQVALEELQDLKGVWSELSKVWEQIDQMKEQPWVSVQPRKLRQNLDALLNQLKSFPARLRQYASYEFVQRLLKGYMKINMLVIELKSEALKDRHWKQLMKRLHVNWVVSELTLGQIWDVDLQKNEAIVKDVLLVAQGEMALEEFLKQIREVWNTYELDLVNYQNKCRLIRGWDDLFNKVKEHINSVSAMKLSPYYKVFEEDALSWEDKLNRIMALFDVWIDVQRRWVYLEGIFTGSADIKHLLPVETQRFQSISTEFLALMKKVSKSPLVMDVLNIQGVQRSLERLADLLGKIQKALGEYLERERSSFPRFYFVGDEDLLEIIGNSKNVAKLQKHFKKMFAGVSSIILNEDNSVVLGISSREGEEVMFKTPVSITEHPKINEWLTLVEKEMRVTLAKLLAESVTEVEIFGKATSIDPNTYITWIDKYQAQLVVLSAQIAWSENVETALSSMGGGGDAAPLHSVLSNVEVTLNVLADSVLMEQPPLRRRKLEHLITELVHQRDVTRSLIKSKIDNAKSFEWLSQMRFYFDPKQTDVLQQLSIQMANAKFNYGFEYLGVQDKLVQTPLTDRCYLTMTQALEARLGGSPFGPAGTGKTESVKALGHQLGRFVLVFNCDETFDFQAMGRIFVGLCQVGAWGCFDEFNRLEERMLSAVSQQVQCIQEALREHSNPNYDKTSAPITCELLNKQVKVSPDMAIFITMNPGYAGRSNLPDNLKKLFRSLAMTKPDRQLIAQVMLYSQGFRTAEVLANKIVPFFKLCDEQLSSQSHYDFGLRALKSVLVSAGNVKRERIQKIKREKEERGEAVDEGEIAENLPEQEILIQSVCETMVPKLVAEDIPLLFSLLSDVFPGVQYHRGEMTALREELKKVCQEMYLTYGDGEEVGGMWVEKVLQLYQITQINHGLMMVGPSGSGKSMAWRVLLKALERLEGVEGVAHIIDPKAISKDHLYGTLDPNTREWTDGLFTHVLRKIIDSVRGELQKRQWIVFDGDVDPEWVENLNSVLDDNKLLTLPNGERLSLPPNVRIMFEVQDLKYATLATVSRCGMVWFSEDVLSTDMIFNNFLARLRSIPLDEGEDEAQRRRKGKEDEGEEAASPMLQIQRDAATIMQPYFTSNGLVTKALEHAFQLEHIMDLTRLRCLGSLFSMLHQACRNVAQYNANHPDFPMQIEQLERYIQRYLVYAILWSLSGDSRLKMRAELGEYIRRITTVPLPTAPNIPIIDYEVSISGEWSPWQAKVPQIEVETHKVAAPDVVVPTLDTVRHEALLYTWLAEHKPLVLCGPPGSGKTMTLFSALRALPDMEVVGLNFSSATTPELLLKTFDHYCEYRRTPNGVVLAPVQLGKWLVLFCDEINLPDMDKYGTQRVISFIRQMVEHGGFYRTSDQTWVKLERIQFVGACNPPTDPGRKPLSHRFLRHVPVVYVDYPGPASLTQIYGTFNRAMLRLIPSLRTYAEPLTAAMVEFYTMSQERFTQDTQPHYIYSPREMTRWVRGIFEALRPLETLPVEGLIRIWAHEALRLFQDRLVEDEERRWTDENIDTVALKHFPNIDREKAMSRPILYSNWLSKDYIPVDQEELRDYVKARLKVFYEEELDVPLVLFNEVLDHVLRIDRIFRQPQGHLLLIGVSGAGKTTLSRFVAWMNGLSVYQIKVHRKYTGEDFDEDLRTVLRRSGCKNEKIAFIMDESNVLDSGFLERMNTLLANGEVPGLFEGDEYATLMTQCKEGAQKEGLMLDSHEELYKWFTSQVIRNLHVVFTMNPSSEGLKDRAATSPALFNRCVLNWFGDWSTEALYQVGKEFTSKMDLEKPNYIVPDYMPVVYDKLPQPPSHREAIVNSCVFVHQTLHQANARLAKRGGRTMAITPRHYLDFINHYANLFHEKRSELEEQQMHLNVGLRKIKETVDQVEELRRDLRIKSQELEVKNAAANDKLKKMVKDQQEAEKKKVMSQEIQEQLHKQQEVIADKQMSVKEDLDKVEPAVIEAQNAVKSIKKQHLVEVRSMANPPAAVKLALESICLLLGESTTDWKQIRSIIMRENFIPTIVNFSAEEISDAIREKMKKNYMSNPSYNYEIVNRASLACGPMVKWAIAQLNYADMLKRVEPLRNELQKLEDDAKDNQQKANEVEQMIRDLEASIARYKEEYAVLISEAQAIKADLAAVEAKVNRSTALLKSLSAERERWEKTSETFKNQMSTIAGDCLLSAAFIAYAGYFDQQMRQNLFTTWSHHLQQANIQILPGRNTFPMLMSVFAGRPAPCLLMTFAQKMPSC

SEQ ID NO: 100175 - protein, 142 aa, Homo sapiens
MAACEGRRSGALGSSQSDFLTPPVGGAPWAVATTVVMYPPPPPPPHRDFISVTLSFGENYDNSKSWRRRSCWRKWKQLSRLQRNMILFLLAFLLFCGLLFYINLADHWKAPGGIYGNELARNQDKEKGRAVCNHLARTQMLI

SEQ ID NO: 100176 - protein, 465 aa, Homo sapiens
MRALWVLGLCCVLLTFGSVRADDEVDVDGTVEEDLGKSREGSRTDDEVVQREEEAIQLDGLNASQIRELREKSEKFAFQAEVNRMMKLIINSLYKNKEIFLRELISNASDALDKIRLISLTDENALSGNEELTVKIKCDKEKNLLHVTDTGVGMTREELVKNLGTIAKSGTSEFLNKMTEAQEDGQSTSELIGQFGVGFYSAFLVADKVIVTSKHNNDTQHIWESDSNEFSVIADPRGNTLGRGTTITLVLKEEASDYLELDTIKNLVKKYSQFINFPIYVWSSKTETVEEPMEEEEAAKEEKEESDDEAAVEEEEEEKKPKTKKVEKTVWDWELMNDIKPIWQRPSKEVEEDEYKAFYKSFSKESDDPMAYIHFTAEGEVTFKSILFVPTSAPRGLFDEYGSKKSDYIKLYVRRVFITDDFHDMMPKYLNFVKGVVDSDDLPLNVSRETLQQHKLLKVSEEACS

SEQ ID NO: 100177 - protein, 156 aa, Homo sapiens
  MOD_RES (1)..(1): Any amino acid
XDTLLKREQQIDEKEHTPDIVKLYEKLRLCMEKVDQKAPEYIRMAASLNAGETTYSLEHASDLRVEVQKVYELIDALSKKILTLGLNQDPPPHPSNLRLQRMIRYSATLFVQEKLLGLMSLPTKEQFEELKKKRKEEMERKRAVERQGLFFFQSFC

SEQ ID NO: 100178 - protein, 59 aa, Homo sapiens
MAPVVTGKFGERPPPKRLTREAMRNYLKERGDQTVLILHAKVAQKSYGNEKRVTWNWAH

SEQ ID NO: 100179 - protein, 94 aa, Homo sapiens
MADANSPPKPLSKPRTPRRSKSDGEAKRSRDPPASASQVTGIRAEPSPSPRITRKSTRQTTITSHFAKGPAKRKPQEESERAKSDESIKEEDKD

SEQ ID NO: 100180 - protein, 802 aa, Homo sapiens
MSKKRKALEGGGGGGEPQLPEEEPTAWFGDSSEEQGLTDEKVKAYLSLHPQVLDEFVSESVSAETVEKWLKRKNNKSEDESAPKEVSRYQDTNMQGVVYELNSYIEQRLDTGGDNQLLLYELSSIIKIATKADGFALYFLGECNNSLCIFTPPGIKEGKPRLIPAGPITQGTTVSAYVAKSRKTLLVEDILGDERFPRGTGLESGTRIQSVLCLPIVTAIGDLIGILELYRHWGKEAFCLSHQEVATANLAWASVAIHQVQVCRGLAKQTELNDFLLDVSKTYFDNIVAIDSLLEHIMIYAKNLVNADRCALFQVDHKNKELYSDLFDIGEEKEGKPVFKKTKEIRFSIEKGIAGQVARTGEVLNIPDAYADPRFNREVDLYTGYTTRNILCMPIVSRGSVIGVVQMVNKISGSAFSKTDENNFKMFAVFCALALHCANMYHRIRHSECIYRVTMEKLSYHSICTSEEWQGLMQFTLPVRLCKEIELFHFDIGPFENMWPGIFVYMVHRSCGTSCFELEKLCRFIMSVKKNYRRVPYHNWKHAVTVAHCMYAILQNNHTLFTDLERKGLLIACLCHDLDHRGFSNSYLQKFDHPLAALYSTSTMEQHHFSQTVSILQLEGHNIFSTLSSSEYEQVLEIIRKAIIATDLALYFGNRKQLEEMYQTGSLNLNNQSHRDRVIGLMMTACDLCSVTKLWPVTKLTANDIYAEFWAEGDEMKKLGIQPIPMMDRDKKDEVPQGQLGFYNAVAIPCYTTLTQILPPTEPLLKACRDNLSQWEKVIRGEETATWISSPSVAQKAAASED

SEQ ID NO: 100181 - protein, 84 aa, Homo sapiens
  MOD_RES (1)..(1): Any amino acid
XLPSPRTPRTTRSSVTSPDEISLSPGDLDTSLCDICMCSISVFEDPVDMPCGHDFCRGCWESIVISRESLPMISSVNFTCKIKI

SEQ ID NO: 100182 - protein, 97 aa, Homo sapiens
MDNAADFCQLSGMHLLVGRYLEAGAAGLRWRAAQLIGTCSQNVAAIQEQVLGLGALRKLLRLLDRDACDTVRVKALFAISCLVREQEAGLLQFLRLD

SEQ ID NO: 100183 - protein, 174 aa, Homo sapiens
MGNVPSAVKHCLSYQQLLREHLWIGDSVAGALDPAQETSQLSGLPEFVKIVEVGPRDGLQNEKVIVPTDIKIEFINRLSQTGLSVIEVTSFVSSRWVPQMGINVVDSAVSGLGGCPYAKGASGNVATEDLIYMLNGLGLNTGVNLYKVMEAGDFICKAVNKTTNSKVAQASFNA

SEQ ID NO: 100184 - protein, 652 aa, Homo sapiens
MASVAWAVLKVLLLLPTQTWSPVGAGNPPDCDSPLASALPRSSFSSSSELSSSHGPGFSRLNRRDGAGGWTPLVSNKYQWLQIDLGERMEVTAVATQGGYGSSDWVTSYLLMFSDGGRNWKQYRREESIWGFPGNTNADSVVHYRLQPPFEARFLRFLPLAWNPRGRIGMRIEVYGCAYKSEVVYFDGQSALLYTLDKKPLKPIRDVISLKFKAMQSNGILLHREGQHGNHITLELIKGKLVFFLNSGNAKLPSTIAPVTLTLGSLLDDQHWHSVLIELLDTQVNFTVDKHTHHFQAKGDSSNLDLNFEISFGGILSPGRSRAFTRKSFHGCLENLYYNGVDVTELAKKHKPQILMMGNVSFSCPQPQTVPVTFLSSRSYLALPGNSGEDKVSVTFQFRTWNRAGHLLFGELQRGSGSFVLFLKDGKLKLSLFQAGQSPRNVTAGAGLNDGQWHSVSFSAKWSHMNVVVDDDTAVQPLVAVLIDSGDTYYFGALYEQSCEAHKHRGNPSGLYYIDADGSGPLGPFLVYCNMTDSAWTVVRHGGPDAVTLRGAPSGHPLSAVSFAYAAGAGQLRAAVNLAERCEQRLALRCGTARRPDSRDGTPLSWWVGRTNETHTSWGGSLPDAQKCTCGLEGNCIDSQYYCNCDAGQNEW

SEQ ID NO: 100185 - protein, 61 aa, Homo sapiens
EKRGPTSSNPRKRHREDSDVEMVEDDSRKEMTAACTPRRRIINLTSVLSLQEEINEQGHEE

SEQ ID NO: 100186 - protein, 58 aa, Homo sapiens
MGNHLSLLLFAMVACYPGNGTGYVRHVDNPNGDGRCVTCIYYLNKDWDAKVRNNCLVF

SEQ ID NO: 100187 - protein, 88 aa, Homo sapiens
YLVTEWLNDKAEKQECPVECPLRITTDPTVLATTLNMLPGLIHSPLICTTPKHYIRFGSPFIPERRRRPLLPDGTFSSCKKGRRATEW

SEQ ID NO: 100188 - protein, 150 aa, Homo sapiens
TSPLGTQLVLDPGNSALLGCPIKGHPVPNITWFHGGQPIVTATGLTHHILAAGQILQVANLSGGSQGEFSCLAQNEAGVLMQKASLVIQDYWWSVDRLATCSASCGNRGVQQPRLRCLLNSTEVNPAHCAGKVRPAVQPIACNRRDCPSR

SEQ ID NO: 100189 - protein, 128 aa, Homo sapiens
MQGTVAFEDVAVNFSQEEWSLLSEVQRCLYHDVMLENWVLISSLGCWCGSEDEEAPSKKSISIQRVSQNVRLSAQAGVARSQLTAASTSRVQAILLPQPPGDLKGISLCPPHLFIFGKLYAFASSPRL

SEQ ID NO: 100190 - protein, 482 aa, Homo sapiens
MADVLSVLRQYNIQKKEIVVKGDEVIFGEFSWPKNVKTNYVVWGTGKEGQPREYYTLDSILFLLNNVHLSHPVYVRRAATENIPVVRRPDRKDLLGYLNGEASTSASIDRSAPLEIGLQRSTQVKRAADEVLAEAKKPRIEDEECVRLDKERLAARLEGHKEGIVQTEQIRSLSEAMSVEKIAAIKAKIMAKKRSTIKTDLDDDITALKQRSFVDAEVDVTRDIVSRERVWRTRTTILQSTGKNFSKNIFAILQSVKAREEGRAPEQRPAPNAAPVDPTLRTKQPIPAAYNRYDQERFKGKEETEGFKIDTMGTYHGMTLKSVTEGASARKTQTPAAQPVPRPVSQARPPPNQKKGSRTPIIIIPAATTSLITMLNAKDLLQDLKFVPSDEKKKQGCQRENETLIQRRKDQMQPGGTAISVTVPYRVVDQPLKLMPQDWDRVVAVFVQGPAWQFKGWPWLLPDGSPVDIFAKNAGMSGLRLL

SEQ ID NO: 100191 - protein, 183 aa, Homo sapiens
KAEEERDEEEDKRRKGEEVTPISAIRHEGKELEKTQDDLMKHQTNISELKRTFLETSTDTAVTNEWEKRLSTSPVRLAARQEDAPMIEPLVPEEKMETKTESSGIETEPTVHHLPLSTEKVVQETVLVEERRVVHASGDASYSAGDSGDAAAQPAFTGIKGKEGSALTEGAKEEGGEEVAKAV

SEQ ID NO: 100192 - protein, 92 aa, Homo sapiens
MVVQDPLLCDLPIQVTLEEVNSQIALEYGQAMTVRVCKMDGEVMPVVVVQSATVLDLKKAIQRYVQLKQEREGGIQHISCKVCLAKPPQTAL

SEQ ID NO: 100193 - protein, 132 aa, Homo sapiens
MRQDSLEPVLRDPCYLINEGICNRNIDQTMLSILLFFHSASGASVVAIDNKIEQAMDLVKNHLMYAVREEVEILKEQIRELVEKNSQLERENTLLKTLASPEQLEKFQSCLSPEEPAPESPQVPEAPGGSAV

SEQ ID NO: 100194 - protein, 26 aa, Homo sapiens
MEKKVDVTSKAVTEVLARTIEYLQPN

SEQ ID NO: 100195 - protein, 1023 aa, Homo sapiens
MDDWKSRLVIKSMLPHFAMVGNRQEPRKLQESGKKPSWMEEEDLSFLYKSSPGRKHQGTVKRRQEEDHFQFPDMADGGYPNKIKRPCLEDVTLAMGPGAHPSTACAELQVPPLTINPSPAAMGVAGQSLLLENNPMNGNIMGSPFVVPQTTEVGLKGPTVPYYEKINSVPAVDQELQELLEELTKIQDPSPNELDLEKILGTKPEEPLVLDHPQATLSTTPKPSVQMSHLESLASSKEFASSCSQVTGMSLQIPSSSTGISYSIPSTSKQIVSPSSSMAQSKSQVQAMLPVALPPLPVPQWHHAHQLKALAASKQGSATKQQGPTPSWSGLPPPGLSPPYRPVPSPHPPPLPLPPPPPPFSPQSLMVSCMSSNTLSGSTLRGSPNALLSSMTSSSNAALGPAMPYAPEKLPSPALTQQPQFGPQSSILANLMSSTIKTPQGHLMSALPASNPGPSPPYRPEKLSSPGLPQQSFTPQCSLIRSLTPTSNLLSQQQQQQQQQQQANVIFKPISSNSSKTLSMIMQQGMASSSPGATEPFTFGNTKPLSHFVSEPGPQKMPSMPTTSRQPSLLHYLQQPTPTQASSATASSTATATLQLQQQQQQQQQQPDHSSFLLQQMMQQPQRFQRSVASDSMPALPRQQEEQRSGLMAMTPERQNAYISQQMSPFEAVQEQVTSKCSRIKASPPSSKHLMPPRTGLLQNNLSPGMIPLTRHQSCEGMGVISPTLGKRQGIFTSSPQCPILSHSGQTPLGRLDSVCQHMQSPKATPPEVPLPGFCPSSLGTQSLSPHQLRRPSVPRMPTAFNNAAWVTAAAAVTTAVSGKTPLSQVDNSVQQHSPSGQACLQRPSDWEAQVPAAMGTQVPLANNPSFSLLGSQSLRQSPVQGPVPVANTTKFLQQGMASFSPLSPIQGIEPPSYVAAAATAAAASAVAASQFPGPFDRTDIPPELPPADFLRQPQPPLNDLISSPDCNEVDFIEALLKGSCVSPDEDWVCNLRLIDDILEQHAAAQNATAQNSGQVTQDAGAL

SEQ ID NO: 100196 - protein, 73 aa, Homo sapiens
  MOD_RES (1)..(1): Any amino acid
XFSLLISYYGLVFDLQSLGRDIFLLQALFGAVDFLGRATTALLLSFLGRRTIQAGSQAMAGLAILANMLVPQG

SEQ ID NO: 100197 - protein, 194 aa, Homo sapiens
MEDGKPVWAPHPTDGFQMGNIVDIGPDSLTIEPLNQKGKTFLALINQVFPAEEDSKKDVEDNCSLMYLNEATLLHNIKVRYSKDRIYTYVANILIAVNPYFDIPKIYSSEAIKSYQGKSLGTRPPHVFAIADKAFRDMKVLKMSQSIIVSGESGAGKTENTKFVLRVLLCCPVTQAVGQWCNHSSLHPRPPGAK

SEQ ID NO: 100198 - protein, 168 aa, Homo sapiens
  MOD_RES (1)..(1): Any amino acid
XDLMHISRARKPAFILGSMRDEKRTHDHLLCLDGGGVKGLIIIQLLIAIEKASGVATKDLFDWVAGTSTGGILALAILHSKSMAYMRGMYFRMKDEVFRGSRPYESGPLEEFLKREFGEHTKMTDVRKPKLDQSDTPPALPERACFAGMVRGEAHLSRTEGDADRDTV

SEQ ID NO: 100199 - protein, 192 aa, Homo sapiens
  MOD_RES (1)..(1): Any amino acid
XDDLERAKRATIMSLEDFEQRLNQAIERNAFLESELDEKENLLESVQRLKDEARDLRQELAVQQKQEKPRTPMPSSVEAERTDTAVQATGSVPSTPIAHRGPSSSLNTPGSFRRGLDDSTGGTPLTPAARISALNIVGDLLRKVGRFNKVNQRVKDSRSGFPTSYKRSWIIGRHWSPNSLPAGTSCTISPQT

SEQ ID NO: 100200 - protein, 370 aa, Homo sapiens
MVPWVRTMGQKLKQRLRLDVGREICRQYPLFCFLLLCLSAASLLLNRYIHILMIFWSFVAGVVTFYCSLGPDSLLPNIFFTIKYKPKQLGLQELFPQGHSCAVCGKVKCKRHRPSLLLENYQPWLDLKISSKVDASLSEVDIPSIITKKLLKAAMKHIEVIVKARQKVKNTEFLQQAALEEYGPELHVALRSRRDELHYLRKLTELLFPYILPPKATDCRSLTLLIREILSGSVFLPSLDFLADPDTVNHLLIIFIDDSPPEKATEPASPLVPFLQKFAEPRNKKPSVLKLELKQIREQQDLLFRFMNFLKQEGAVHVLQFCLTRNLMIEFYDQNYQMMKCCLFMKNCRRFIKHTVWMKVLTKLDLIPSL

SEQ ID NO: 100201 - protein, 182 aa, Homo sapiens
YTEVSGTLWQVQMHYEMLFNSFQGFFVAIIYCFCNGENTPEDILKAEKSFQMMQVQAEIKKSWSRWTLALDFKRKARSGSSSYSYGPMVSHTSVTNVGPRVGLGLPLSPRLLPTATTNGHPQLPGHAKPGTPALETLETTPPAMAAPKDDGFLNGSCSGLDEEASGPERPPALLQEEWETVM

SEQ ID NO: 100202 - protein, 153 aa, Homo sapiens
GDHRVELYKVLSSLGYHVVTFDYRGWGDSVGTPSERGMTYDALHVFDWIKARSGDNPVYIWGHSLGTGVATNLVRRLCERETPPDALILESPFTNIREEAKSHPFSVIYRYFPGFDWFFLDPITSSGIKFANDEKPQQGPGSSPDPSMWSELV

SEQ ID NO: 100203 - protein, 732 aa, Homo sapiens
MGLPEPGPLRLLALLLLLLLLLLLQLQHLAAAAADPLLGGQGPAKDCEKDQFQCRNERCIPSVWRCDEDDDCLDHSDEDDCPKKTCADSDFTCDNGHCIHERWKCDGEEECPDGSDESEATCTLGTCRGDEFQCGDGTCVLAIKHCNQEQDCPDGSDEAGCLQGLNECLHNNGGCSHICTDLKIGFECTCPAGFQLLDQKTCGDIDECKDPDACSQICVNYKGYFKCECYPGYEMDLLTKNCKAAAGKSPSLIFTNRHEVRRIDLVKRNYSRLIPMLKNVVALDVEVATNRIYWCDLSYRKIYSAYMDKASDPKEQEVLIDEQLHSPEGLAVDWVHKHIYWTDSGNKTISVATVDGGRRRTLFSRNLSEPRAIAVDPLRGFMYWSDWGDQAKIEKSGLNGVDRQTLVSDNIEWPNGITLDLLSQRLYWVDSKLHQLSSIDFSGGNRKTLISSTDFLSHPFGIAVFEDKVFWTDLENEAIFSANRLNGLEISILAENLNNPHDIVIFHELKQPRAPDACELSVQPNGGCEYLCLPAPQISSHSPKYTCACPDTMWLGPDMKRCYRAPQSTSTTTLASTMTRTVPATTRAPGTTVHRSTYQNHSTETPSLTAAVPSSVSVPRAPSISPSTLSPATSNHSQHYANEDSKMGSTVTAAVIGIIVPIVVIALLCMSGYLIWRNWKRKNTKSMNFDNPVYRKTTEEEDEDELHIGRTAQIGHVYPARVALSLEDDGLP

SEQ ID NO: 100204 - protein, 156 aa, Homo sapiens
MYSMSFNDSQANGMEGPRENQDPPPRSLARHLSDADRLRKVIQELVDTEKSYVKDLSCLFELYLEPLQNETFLTQDEMESLFGSLPEMLEFQKVFLETLEDGISASSDFNTLETPSQFRKLLFSLGGSFLYYADHFKLYSGFCANHIKVQKVLERA

SEQ ID NO: 100205 - protein, 184 aa, Homo sapiens
  MOD_RES (1)..(1): Any amino acid
XLESPPKGVTIPYRPKPSSSPVIFAGGQDRYSTGSDSASFPHTTPSMCLNPDLEGPPLEAYTIQGQYAIPQPDLTKLHQLAMQQSHFPMTHGNTGFSAGLDASAQTTSHELTIPNDLIGCIIGRQGAKINEIRQMSGAQIKIANPVEGSTDRQVTITGSAASISLAQYLINVRLSSETGGMGSS

SEQ ID NO: 100206 - protein, 21 aa, Homo sapiens
  MOD_RES (1)..(1): Any amino acid
XQFCILSGGGESKAGFSAGWG

SEQ ID NO: 100207 - protein, 142 aa, Homo sapiens
MASPGKDNYRMKSYKNKALNPQEMRRRREEEGIQLRKQKREEQLFKRRNVYLPRNDESMLESPIQDPDISSTVPIPEEEVVTTDMVQMIFSNNADQQLTATQKFRKLLSKEPNPPIDQVIQKPGVVQRFVKFLERNENCTLQ

SEQ ID NO: 100208 - protein, 245 aa, Homo sapiens
MAEAAAAAGGTGLGAGASYGSAADRDRDPDPDRAGRRLRVLSGHLLGRPREALSTNECKARRAASAATAAPTATPAAQESGTIPKKRQEVMKWNGWGYNDSKFIFNKKGQIELTGKRYPLSGMGLPTFKEWIQNTLGVNVEHKTTSKASLNPSDTPPSVVNEDFLHDLKETNISYSQEADDRVFRAHGHCLHEIFLLREGMFERIPDIVLWPTCHDDVVKIVNLACKYNLCIIPIGVPQIARGFT

SEQ ID NO: 100209 - protein, 113 aa, Homo sapiens
MALYYDHQIEAPDAAGSPSFISWHPVHPFLAVAYISTTSTGSVDIYLEQGECVPDTHVERPFRVASLCWHPTRLVLAVGWETGEVTVFNKQDKEQHTMPLTHTADITVLRWSP

SEQ ID NO: 100210 - protein, 205 aa, Homo sapiens
MSVKANSPPVIVNTDTLEAPGYVNGTEGEMEYEEITLERGNSGLGFSIAGGTDNPHIGDDPSIFITKIIPGGAAAQDGRLRVNDSILFVNEVDVREVTHSAAVEALKEAGSIVRLYVMRRKPPAEKVMEIKLIKGPKGLGFSIAGGVGNQHIPGDNSIYVTKIIEGGAAHKDGRLQIGDKILAVNSVGLEDVMHEDAVAALKNTY

SEQ ID NO: 100211 - protein, 118 aa, Homo sapiens
MPPRPSSGELWGIHLMPPRILVECLLPNGMIVTLECLREATLITIKHELFKEARKYPLHQLLQDESSYIFVSVTQEAEREEFFDETRRLCDLRLFQPFLKVIEPVGNREEKILNREIG

SEQ ID NO: 100212 - protein, 99 aa, Homo sapiens
MPRVKAAQAGRQSSAKRHLAEQFAVGEIITDMAKKEWKVGLPIGQGGFGCIYLADMNSSESVGSDAPCVVKVEPSDNGPLFTELKFYQRAAKPEQITGL

SEQ ID NO: 100213 - protein, 200 aa, Homo sapiens
MTAPAGPRGSETERLLTPNPGYGTQAGPSPAPPTPPEEEDLRRRLKYFFMSPCDKFRAKGRKPCKLMLQVVKILVVTVQLILFGLSNQLAVTFREENTIAFRHLFLLGYSDGADDTFAAYTREQLYQAIFHAVDQYLALPDVSLGRYAYVRGGGDPWTNGSGLALCQRYYHRGHVDPANDTFDIDPMVVTGWSMSPSTSG

SEQ ID NO: 100214 - protein, 41 aa, Homo sapiens
MAEGEITTFTALTEKFNLPPGNYKKPKLLYCSNGGHFLRIL

SEQ ID NO: 100215 - protein, 125 aa, Homo sapiens
  MOD_RES (1)..(1): Any amino acid
XFSLPSSDVTNNLKPSLHPQMNLLALENTEIPPFAQRTSQNLTSSHAYDNFLEHSNSVFLQPVSLQTIAAAPSNQSLPPLPSNHPAMTKSDLQPPNYYEVMEFDPLAPAVTTEYIFQLQTYVRRI

SEQ ID NO: 100216 - protein, 49 aa, Homo sapiens
MDQPAGLQVDYVFRGVEHAVRVMVSGQVLELEVEDRMTADQWRGEFDAG

SEQ ID NO: 100217 - protein, 158 aa, Homo sapiens
MASSSSLVPDRLRLPLCFLGVFVCYFYYGILQEKMVDRTRSWLYAACSISYLGAMVSSNSALQFVNYPTQVLGKSCKPIPVMLLGVTLLKKKYPLAKYLCVLLIVAGVALFMYKPKKVVGIEEHTVGYGELLLLLSLTLDGLTGVSQDHMRAHYQTGS

SEQ ID NO: 100218 - protein, 210 aa, Homo sapiens
  MOD_RES (1)..(1): Any amino acid
XGGTAGGAAPGCPGEGASGCWEDESNVLENASIEPGICQEMLMGLEAKQSESLSELITLREALESSHLEGELLRQEQTEVTAALARAEQSIAELSSSENTLKTEVADLRAAAVKLSALNEALALDKVGLNQQLLQLEEENQSVCSRMEAAEQARNALQVDLAEAEKRREALWEKNTHLEAQLQKAEEAGAELQADLRDIQEEKEEIQKKL

SEQ ID NO: 100219 - protein, 1061 aa, Homo sapiens
MSYNYVVTAQKPTAVNGCVTGHFTSAEDLNLLIAKNTRLEIYVVTAEGLRPVKEVGMYGKIAVMELFRPKGESKDLLFILTAKYNACILEYKQSGESIDIITRAHGNVQDRIGRPSETGIIGIIDPECRMIGLRLYDGLFKVIPLDRDNKELKAFNIRLEELHVIDVKFLYGCQAPTICFVYQDPQGRHVKTYEVSLREKEFNKGPWKQENVEAEASMVIAVPEPFGGAIIIGQESITYHNGDKYLAIAPPIIKQSTIVCHNRVDPNGSRYLLGDMEGRLFMLLLEKEEQMDGTVTLKDLRVELLGETSIAECLTYLDNGVVFVGSRLGDSQLVKLNVDSNEQGSYVVAMETFTNLGPIVDMCVVDLERQGQGQLVTCSGAFKEGSLRIIRNGIGIHEHASIDLPGIKGLWPLRSDPNRETDDTLVLSFVGQTRTSLSLGFLPLPYSSLFSHTEMEHEVACLDITPLGDSNGLSPLCAIGLWTDISARILKLPSFELLHKEMLGGEIIPRSILMTTFESSHYLLCALGDGALFYFGLNIETGLLSDRKKVTLGTQPTVLRTFRSLSTTNVFACSDRPTVIYSSNHKLVFSNVNLKEVNYMCPLNSDGYPDSLALANNSTLTIGTIDEIQKLHIRTVPLYESPRKICYQEVSQCFGVLSSRIEVQDTSGGTTALRPSASTQALSSSVSSSKLFSSSTAPHETSFGEEVEVHNLLIIDQHTFEVLHAHQFLQNEYALSLVSCKLGKDPNTYFIVGTAMVYPEEAEPKQGRIVVFQYSDGKLQTVAEKEVKGAVYSMVEFNGKLLASINSTVRLYEWTTEKELRTECNHYNNIMALYLKTKGDFILVGDLMRSVLLLAYKPMEGNFEEIARDFNPNWMSAVEILDDDNFLGAENAFNLFVCQKDSAATTDEERQHLQEVGLFHLGEFVNVFCHGSLVMQNLGETSTPTQGSVLFGTVNGMIGLVTSLSESWYNLLLDMQNRLNKVIKSVGKIEHSFWRSFHTERKTEPATGFIDGDLIESFLDISRPKMQEVVANLQYDDGSGMKREATADDLIKVVEELTRIH

SEQ ID NO: 100220 - protein, 224 aa, Homo sapiens
MSGFQINLNPLKEPLGFIKVLEWIASIFAFATCGGFKGQTEIQVNCPPAVTENKTVTATFGYPFRLNEASFQPPPGVNICDVNWKDYVLIGDYSSSAQFYVTFAVFVFLYCIAALLLYVGYTSLYLDSRKLPMIDFVVTLVATFLWLVSTSAWAKALTDIKIATGHNIIDELPPCKKKAVLCYFGSVTSMGSLNVSVMEFRYVAQTGVQWHDLGTLQPPPPGFK

SEQ ID NO: 100221 - protein, 96 aa, Homo sapiens
MKFFLLLFTIGFCWAQYSPNTQQGRTSIVHLFEWRWVDIALECERYLAPKGFGGVQVSPPNENVAIHNPFRPWWERYQPVSYKLCTRSGNEDEFRN

SEQ ID NO: 100222 - protein, 171 aa, Homo sapiens
MASSSVPPATVSAATAGPGPGFGFASKTKKKHFVQQKVKVFRAADPLVGVFLWGVAHSINELSQVPPPVMLLPDDFKASSKIKVNNHLFHRENLPSHFKFKEYCPQVFRNLRDRFGIDDQDYLVSLTRNPPSESEGSDGRFLISYDRTLVIKEVSSEDIADMHSNLSNYHQ

SEQ ID NO: 100223 - protein, 971 aa, Homo sapiens
  MOD_RES (1)..(1): Any amino acid
XAPWTILGLDAMYVIMWITYMAFLLVFFGAFFAVWCYRKRYFVSEYTPIDSNIAFSVNASDKGTAWLLTSTFPSSPVLPGEASCCDPVSAAFEGCLRRLFTRWGSFCVRNPGCVIFFSLVFITACSSGLVFVRVTTNPVDLWSAPSSQARLEKEYFDQHFGPFFRTEQLIIRAPLTDKHIYQPYPSGADVPFGPPLDIQILHQVLDLQIAIENITASYDNETVTLQDICLAPLSPYNTNCTILSVLNYFQNSHSVLDHKKGDDFFVYADYHTHFLYCVRFINFVKNYKNPNLTISFTAERSIEDELNRESDSDVFTVVISYAIMFLYISLALGHMKSCRRLLVDSKVSLGIAGILIVLSSVACSLGVFSYIGLPLTLIVIEVIPFLVLAVGVDNIFILVQAYQRDERLQGETLDQQLGRVLGEVAPSMFLSSFSETVAFFLGALSVMPAVHTFSLFAGLAVFIDFLLQITCFVSLLGLDIKRQEKNRLDIFCCVRGAEDGTSVQASESCLFRFFKNSYSPLLLKDWMRPIVIAIFVGVLSFSIAVLNKVDIGLDQSLSMPDDSYMVDYFKSISQYLHAGPPVYFVLEEGHDYTSSKGQNMVCGGMGCNNDSLVQQIFNAAQLDNYTRIGFAPSSWIDDYFDWVKPQSSCCRVDNITDQFCNASVVDPACVRCRPLTPEGKQRPQGGDFMRFLPMFLSDNPNPKCGKGGHAAYSSAVNILLGHGTRVGATYFMTYHTVLQTSADFIDALKKARLIASNVTETMGINGSAYRVFPYSVFYVFYEQYLTIIDDTIFNLGVSLGAIFLVTMVLLGCELWSAVIMCATIAMVLVNMFGVMWLWGISLNAVSLVNLVMSCGISVEFCSHITRAFTVSMKGSRVERAEEALAHMGSSVFSGITLTKFGGIVVLAFAKSQIFQIFYFRMYLAMVLLGATHGLIFLPVLLSYIGPSVNKAKSCATEERYKGTERERLLNF

SEQ ID NO: 100224 - protein, 144 aa, Homo sapiens
MSFIFDWIYSGFSSVLQFLGLYKKTGKLVFLGLDNAGKTTLLHMLKDDRLGQHVPTLHPTSEELTIAGMTFTTFDLGGHVQARRVWKNYLPAINGIVFLVDCADHERLLESKEELDVRYFVKGPNSSRQGQHQIWGHRVSRSMI

SEQ ID NO: 100225 - protein, 81 aa, Homo sapiens
  MOD_RES (1)..(1): Any amino acid
XEAVRLICDPETPDASYLWLLNGQNLPMTHRLQLSKTNRTLYLFGVTKYIAGPYECEIRNPVSASRSDPVTLNLLRGRCQL

SEQ ID NO: 100226 - protein, 226 aa, Homo sapiens
  MOD_RES (1)..(1): Any amino acid
XETDAVFLLESINGKSESPDHMVSQYQQALEEIERLKKQCSALQHVKAECSQCSNNESKSEMDEMAVQLDDVFRQLDKCSIERDQYKSEVELLEMEKSQIRSQCEELKTEVEQLKSTNQQTATDVSTSSNIEESVNHMDGESLKLRSLRVNVGQLLAMIVPDLDLQQILKYCQDMRLRKCGSQLQTEQLLFNRTTWAFMMSQVFLISHGVPVGSEALGLYCDLNHD

SEQ ID NO: 100227 - protein, 79 aa, Homo sapiens
MATGTGKHKLLSTGPTEPWSIREKLCLASSVMRSGDQNWVSVSRAIKPFAEPGRPPDWFSQKHCASQYSELLETTETPK

SEQ ID NO: 100228 - protein, 1056 aa, Homo sapiens
MDSQELKTLINYYCQERYFHHVLLVASEGIKRYGSDPVFRFYHAYGTLMEGKTQEALREFEAIKNKQDVSLCSLLALIYAHKMSPNPDREAILESDARVKEQRKGAGEKALYHAGLFLWHIGRHDKAREYIDRMIKISDGSKQGHVLKAWLDITRGKEPYTKKALKYFEEGLQDGNDTFALLGKAQCLEMRQNYSGALETVNQIIVNFPSFLPAFVKKMKLQLALQDWDQTVETAQRLLLQDSQNVEALRMQALYYVCREGDIEKASTKLENLGNTLDAMEPQNAQLFYNITLAFSRTCGRSQLILQKIQTLLERAFSLNPQQSEFATELGYQMILQGRVKEALKWYKTAMTLDETSVSALVGFIQCQLIEGQLQDADQQLEFLNEIQQSIGKSAELIYLHAVLAMKKNKRQEEVINLLNDVLDTHFSQLEGLPLGIQYFEKLNPDFLLEIVMEYLSFCPMQPASPGQPLCPLLRRCISVLETVVRTVPGLLQTVFLIAKVKYLSGDIEAAFNNLQHCLEHNPSYADAHLLLAQVYLSQEKVKLCSQSLELCLSYDFKVRDYPLYHLIKAQSQKKMGEIADAIKTLHMAMSLPGMKRIGASTKSKDRKTEVDTSHRLSIFLELIDVHRLNGEQHEATKVLQDAIHEFSGTSEEVRVTIANADLALAQGDIERALSILQNVTAEQPYFIEAREKMADIYLKHRKDKMLYITCFREIAERMANPRSFLLLGDAYMNILEPEEAIVAYEQALNQNPKDGTLASKMGKALIKTHNYSMAITYYEAALKTGQKNYLCYDLAELLLKLKWYDKAEKVLQHALAHEPVNELSALMEDGRCQVLLAKVYSKMEKLGDAITALQQARELQARVLKRVQMEQPDAVPAQKHLAAEICAEIAKHSVAQRDYEKAIKFYREALVHCETDNKIMLELARLYLAQDDPDSCLRQCALLLQSDQDNEAATMMMADLMFRKQDYEQAVFHLQQLLERKPDSSSSGITPYSQYQTKCHTHGCGNIDVYWLNGSVNDCKTPSQLKTQQENRLNLGGGGCREPRSHHCTPASVTE

SEQ ID NO: 100229 - protein, 165 aa, Homo sapiens
MRGYLVAIFLSAVFLYYVLHCILWGTNVYWVAPVEMKRRNKIQPCLSKPAFASLLRFHQFHPFLCAADFRKIASLYGSDKFDLPYGMRTSAEYFRLALSKLQSCDLFDEFDKMNNGPVLGHEEEVGRRTTFRLFYPESVFSDPIHNDPNTTVILTAFKPHDLRWL

SEQ ID NO: 100230 - protein, 59 aa, Homo sapiens
MWAFSELPMPLLINLIVSLLGFVATVTLIPAFRGHFIAARLCGQDLNKTSRQQIIKNRE

SEQ ID NO: 100231 - protein, 51 aa, Homo sapiens
MTTLKEAVTFKDVAVVFTEEELRLLDLAQRKLYREVMLENFRNLLSVGHQS

SEQ ID NO: 100232 - protein, 172 aa, Homo sapiens
TDTMVYFVGENNGDSSHNPVLAATGVGLDVAQSWEKAIRQALMPVTPQASVCTSPGQGKDHKDLSTSISVSNCQIQENVDISTVYQIFADEVLGSGQFGIVYGDLSVLRVVTSLEDFLSSEEQRTVRGKHRKTGRDVAIKVIDKMRFPTKQESQLRNEVAILQNLHHPGIVN

SEQ ID NO: 100233 - protein, 71 aa, Homo sapiens
FAVNMFRTLPPSSNPTGAEFDPEEDEPTLEAAWPHLQLVYEFFLRFLESPDFQPNIAKKYIDQKFVLQVYL

SEQ ID NO: 100234 - protein, 73 aa, Homo sapiens
  MOD_RES (1)..(1): Any amino acid
XARGQGGGPQGVGRMAEGKAGGAAGLFAKQVQKKFSRAQEKVLQKLGKAVETKDERFEQSASNFYQQQFVCLF

SEQ ID NO: 100235 - protein, 62 aa, Homo sapiens
MSTGFSFGSGTLGSTTVAAGGTSTGGVFSFGTGASSSTTLLRLLSFVEQIFIGQIPMCKALF

SEQ ID NO: 100236 - protein, 47 aa, Homo sapiens
MVPWVRTMGQKLKQRLRLDVGREICRQYPLFCFLLLCLSAASLLLNS

SEQ ID NO: 100237 - protein, 54 aa, Homo sapiens
FTNHINVMVKFPSIVEEELQFDLSLVIEEQSEGIVKKGEDEKLDISQFCHRQAL

SEQ ID NO: 100238 - protein, 147 aa, Homo sapiens
MEFNSNVKSWSFSLQQPTQFINPETPGYVGFANLPNQVHRKSVKKGFEFTLMVVGESGLGKSTLINSLFLTDLYPERVIPGAAEKIERTVQIEASTVEIEERGVKLRLTVVDTPGYGDAINCRDCFKTIISYIDEQFERYLHDESGL

SEQ ID NO: 100239 - protein, 59 aa, Homo sapiens
MGSGQKAVLPSPPCLWSSGTAGSRGVQEAAECGTVWRVQCIAERLEKIKSCTWRWLKIP

SEQ ID NO: 100240 - protein, 814 aa, Homo sapiens
MRALWVLGLCCVLLTFGSVRADDEVDVDGTVEEDLGKSREGSRTDDEVVQREEEAIQLDGLNASQIRELREKSEKFAFQAEVNRMMKLIINSLYKNKEIFLRELISNASDALDKIRLISLTDENALSGNEELTVKIKCDKEKNLLHVTDTGVGMTREELVKNLGTIAKSGTSEFLNKMTEAQEDGQSTSELIGQFGVGFYSAFLVADKVIVTSKHNNDTQHIWESDSNEFSVIADPRGNTLGRGTTITLVLKEEASDYLELDTIKNLVKKYSQFINFPIYVWSSKTETVEEPMEEEEAAKEEKEESDDEAAVEEEEEEKKPKTKKVEKTVWDWELMNDIKPIWQRPSKEVEEDEYKAFYKSFSKESDDPMAYIHFTAEGEVTFKSILFVPTSAPRGLFDEYGSKKSDYIKLYVRRVFITDDFHDMMPKYLNFVKGVVDSDDLPLNVSRETLQQHKLLKVIRKKLVRKTLDMIKKIADDKYNDTFWKEFGTNIKLGVIEDHSNRTRLAKLLRFQSSHHPTDITSLDQYVERMKEKQDKIYFMAGSSRKEAESSPFVERLLKKGYEVIYLTEPVDEYCIQALPEFDGKRFQNVAKEGVKFDESEKTKESREAVEKEFEPLLNWMKDKALKDKIEKAVVSQRLTESPCALVASQYGWSGNMERIMKAQAYQTGKDISTNYYASQKKTFEINPRHPLIRDMLRRIKEDEDDKTVLDLAVVLFETATLRSGYLLPDTKAYGDRIERMLRLSLNIDPDAKVEEEPEEEPEETAEDTTEDTEQDEDEEMDVGTDEEEETAKVWQIKNVTCIFSSGKVRTEF

SEQ ID NO: 100241 - protein, 921 aa, Homo sapiens
MLNGAGLDKALKMSLPRRSRIRSSVGPVRSSLGYKKAEDEMSRATSVGDQLEAPARTIYLNQPHLNKFRDNQISTAKYSVLTFLPRFLYEQIRRAANAFFLFIALLQQIPDVSPTGRYTTLVPLIIILTIAGIKEIVEDFKRHKADNAVNKKKTIVLRNGMWHTIMWKEVAVGDIVKVVNGQYLPADVVLLSSSEPQAMCYVETANLDGETNLKIRQGLSHTADMQTREVLMKLSGTIECEGPNRHLYDFTGNLNLDGKSLVALGPDQILLRGTQLRNTQWVFGIVVYTGHDTKLMQNSTKAPLKRSNVEKVTNVQILVLFGILLVMALVSSAGALYWNRSHGEKNWYIKKMDTTSDNFGYNLLTFIILYNNLIPISLLVTLEVVKYTQALFINWDTDMYYIGNDTPAMARTSNLNEELGQVKYLFSDKTGTLTCNIMNFKKCSIAGVTYGHFPELAREPSSDDFCRMPPPCSDSCDFDDPRLLKNIEDRHPTAPCIQEFLTLLAVCHTVVPEKDGDNIIYQASSPDEAALVKGAKKLGFVFTARTPFSVIIEAMGQEQTFGILNVLEFSSDRKRMSVIVRTPSGRLRLYCKGADNVIFERLSKDSKYMEETLCHLEYFATEGLRTLCVAYADLSENEYEEWLKVYQEASTILKDRAQRLEECYEIIEKNLLLLGATAIEDRLQAGVPETIATLLKAEIKIWVLTGDKQETAINIGYSCRLVSQNMALILLKEDSLDATRAAITQHCTDLGNLLGKENDVALIIDGHTLKYALSFEVRRSFLDLALSCKAVICCRVSPLQKSEIVDVVKKRVKAITLAIGDGANDVGMIQTAHVGVGISGNEGMQATNNSDYAIAQFSYLEKLLLVHGAWSYNRVTKCILYCFYKNVVLYIIELWFAFVNGFSGQILFERWCIGLYNVILC

SEQ ID NO: 100242 - protein, 162 aa, Homo sapiens
  MOD_RES (1)..(1): Any amino acid
XAQKMKKAYYLTQKIPDQDFYASVLDVLTPDDVRILVEMEDEFSRRGQFERIFPSHISSRYLRFFEQPRYFNILTTQWEQKYHGNKLKDLLRSWCYKGFHMGVVSDSAPVWSLPTSLLTISKDDVILNAFSKSETSKLGNPVPQRTVRTPAKSPAFLPRRYL

SEQ ID NO: 100243 - protein, 46 aa, Homo sapiens
MPSVTQRLRDPDINPCLSESDASTRCLDENNYDRERCSTYFLRILS

SEQ ID NO: 100244 - protein, 117 aa, Homo sapiens
MYSPIIYQALCEHVQTQMSLMNDLTSKNIPNGIPAVPCHAPSHSESQATPHSSYGLCTSTPVWSLQRPPCPPKVHSEVQTDGNSQFASQGKTVSATCTDVLRNSFNTSPGVPCSLPK

SEQ ID NO: 100245 - protein, 76 aa, Homo sapiens
MPNFCAAPNCTRKSTQSDLAFFRFPRDPARCQKWVENCRRADLEDKTPDQLNKHYRLCAKHFETSMICRTDLLLTV

SEQ ID NO: 100246 - protein, 131 aa, Homo sapiens
MLLLLLLAPLFLRPPGAGGAQTPNATSEGCQIIHPPWEGGIRYRGLTRDQVKAINFLPVDYEIEYVCRGEREVVGPKVRKCLANGSWTDMDTPSRCGTLPSETQASALPGLQHGQVWEGAGDQAREAGRQW

SEQ ID NO: 100247 - protein, 107 aa, Homo sapiens
  MOD_RES (1)..(1): Any amino acid
XSKGDDLSTAILKQKNRPNRLIVDEAINEDNSVVSLSQPNDPKALTFFPQPKMDELQLFRGDTVLLKGKKRREAVCIVLSDDTCSDEKIRMNRVVRNNLRVRLGDVI

SEQ ID NO: 100248 - protein, 354 aa, Homo sapiens
MAQVSINNDYSEWDLSTDAGERARLLQSPCVDTAPKSEWEASPGGLDRGTTSTLGAIFIVVNACLGAGLLNFPAAFSTAGGVAAGIALQMGMLVFIISGLVILAYCSQASNERTYQEVVWAVCGKLTGVLCEVAIAVYTFGTCIAFLIIIGDQQDKIIAVMAKEPEGASGPWYTDRKFTISLTAFLFILPLSIPREIGFQKYASFLSVVGTWYVTAIVIIKYIWPDKEMTPGNILTRPASWMAVFNAMPTICFGFQCHVSSVPVFNSMQQPEVKTWGGVVTAAMVIALAVYMGTAGGCWSATESSWSPWEPSSSARPQPTPSLWISWHNHCLPGNTRPLPLVAGTHLLELWGHS

SEQ ID NO: 100249 - protein, 634 aa, Homo sapiens
MQLLPPPIRTGTKTQMDAKKPRKCDLTPFLVLKARKKQKFTSAKVGSKLSVQIQKPPSNIKNSRMTQVFHKNTSVTSLPFVDTKGKKNTVSFPHISKKVLLKSSLLYQENQAHNQMPASELKASEIPFHPSIKTQDPKAEEKSPKKQKVTLTAAEALKLFKNQLSPYEQSEILGYAELWFLGLEAKKLDTAPEKFSKTSFDDEHGFYLKVLHDHIAYRYEVLETIGKGSFGQVAKCLDHKNNELVALKIIRNKKRFHQQALMELKILEALRKKDKDNTYNVVHMKDFFYFRNHFCITFELLGINLYELMKNNNFQGFSLSIVRRFTLSVLKCLQMLSVEKIIHCDLKPENIVLYQKGQASVKVIDFGSSCYEHQKVYTYIQSRFYRSPEVILGHPYDVAIDMWSLGCITAELYTGYPLFPGENEVEQLACIMEVLGLPPAGFIQTASRRQTFFDSKGFPKNITNNRGKKRYPDSKDLTMVLKTYDTSFLDFLRRCLVWEPSLRMTPDQALKHAWIHQSRNLKPQPRPQTLRKSNSFFPSETRKDKVQGCHHSSRKDEITKETTEKTKDSPTKHVQHSGDQQDCLQHGADTVQLPQLVDAPKKSEAAVGAEVSMTSPGQSKNFSLKNTNVLPPIV

SEQ ID NO: 100250 - protein, 284 aa, Homo sapiens
DLLGEDLLSGKKNQSDLSDEELNDDLLQSDNEDEENFSSQGVTISLNATSGMVTSFELSDNTNDQSGEQESEYEQEQGEDELVYHKSDGSELYTQEYPEEGQYEGHEAELTEDQIEYVEEPEEEQLYTDEVLDIEINEPLDEFTGGMETLELQKDIKEESDEEEEDDEESGRLRFKTERKEGTIIRLSDVTRERRNIPETLELSAEAKAALLEFEERERQHKQGRYSSRRGGRRGGPLMCRGVGDQRRESTERGRMKDHRPALLPTQPPVVILPEEELMSDLMP

SEQ ID NO: 100251 - protein, 4617 aa, Homo sapiens
METFIPIDLTTENQEMDKEETKTKPRLLRYEEKKYEDVKPLETQPAEIAEKETLEYKTVRTFSESLKSEKTEDYLRESIIQQHMVSPEPASLKEKGKSRRKKDQTHACPNVRKARPVSYDRTEPKDDDVIRNIIRLREKLGWQTILPQHSLKYGSSKIAIQKITLKKPLEDDGEFVYCLPRKSPKSLYNPYDLQVVSAHTAKHCKEFWVITASFISKVINIVGSVKEVELIPTLEWLSERRHYYLLRQFKIFSDFRMNKAFVTWKLNVKRIKTEKSRSFLYHHLFLADDLFQTCLVYIRGLCEDAINLKNYNDHENNLSAICLVKLDSSRTYSLDEFCEEQLQQATQALKQLEDIRNKAISEMKSTFLKVAEKNEIKEYFESKLSEDDTTHFKLPKYRRLLETFFKFVMLVDYIFQELIRQLMNTAVTLLLELFNGSAGMPFSVEKKNENLIRTFKDNSFPTGKTTNDCEELVDNSKLHAISVQKSEVKTDTDINEILNSVEVGKDLRKTYAPIFEVNLCLRIPAESDSSENSKENFHESDQCPEECVMFEDEMSENKDNCVKKHSSEELLPKAKKSKEISYNLEDIISDTEIETEFENKYMYYEFPEFPTNLFIDPNRLEFSVKIQNMLTNMEKCITTITPLCQDPQLSIFIDLVSIMDLPNKTGSIIHYKEQTRWPDCHILFETDPAYQNIIVNLLTIIGNSMGLVNAYSHKFIKYCTMTEKAKIMSMKISSMGELTSKEFEAILNRFRNYFRHIVNMAIEKRIGIFNVVSLDYQSECLLYIDNVIHMSHTLIQSVIEKKNKNLLEVVESSLQQLECDPTEIEEFLEHFIFLNAISSKISKLEKEFLTMSQLYSVAKHHQIHISEEQIAIFQVLLLKFSQLKSSMKLSKINKDTAITKFRDNLEACISGLHVDVGNLKAKIRTPLLLCAGTQVSTAMEMIQTLSGEAASLTNKAKAYSHYQDCFSDSQSHMHSVNVEEITQIVLSEISDIEGDLTLRKKLWEAQEEWKRASWEWRNSSLQSIDVESVQRNVSKLMHIISVLEKGLPKSDMVTHLKQVVTEFKQELPIIIALGNPCLKPRHWEALQEIIGKSVPLDKNCKVENLLALKMFQYENEINDMSTSATNEAALEKMLFKIIDFWNTTPLPLILHHTEIYSIFIIPSIDDISAQLEESQVILATIKGSPHIGPIKDLVNEWDQNLTLFSYTLEEWMNCQRNWLYLEPVFHSSEIRRQLPAETELFSQVISMWKKIMSKIQNKQNALQITTSAGVLEILQNCNIHLEHIKKSLEDYLEVKRLIFPRFYFLSNAELLDILADSRNPESVQPHLVKCFENIKQLLIWKQDIGPPAVKMLISAEGEGLVLPKKIRVRSAVEQWLVNVEKSMFDVLKKFLSQGIEDWNCQMFSQWVLSHPGQVVLTVSQIMFYNDCVKSFVSSYSREKLEKVHAGLMCHLEEVADLVVLDTSNSRTKAILGALLILYVHCRDIVINLLLKNIFNAEDFEWTRHLQYKWNEKQKLCYVSQGNASFTYGYEYLGCTSRLVITPLTDRCWLTLMEALHLNLGGCPAGPAGTGKTETVKDLAKSLGKHCVVFNCFEDLDYKIVRKFFFGLVQSGAWSCFDEFNLIDLEVLSVIASQILTIKAAKDNYSARFVLEGKEIRINMSCAVFITMNPRYGGGVELPDNLKSLFRPVAMMVPHYQMIAEIILFSFGFKSANSLSGKLTNLYELARKQLSQQDHYNFGLRSLKIVLIMAGTKKREFKCDTSDSLSEADETLIVIEAIREASLPKCPPEDVPLFENIIGDIFPEVTVLKVNQLALEKVIYTATQQLGLQNWSSQKEKIIQFYNQLQVCVGVMLVGPTGGGKTTVRRILEKALTLLPIADFLSVAERKSASKISERKGKVDICVLNPKCVTLSELYGQLDPNTMEWTDGLLSATIRSYVYFNTPKNTKKDIDLRLKSRISDLSNVFKLDSSDTTETDDNIFEEIEKVVKIPENHNFDWQWIILDGPVDTFWVENLNSVLDDTRTLCLANSERIALTNKIRVIFEVDNLSQASPATVSRCAMVYMDPVDLGWEPYVKSWLLKTSKIISQSGVDCLEFMIKNSVTDGLQFIRNRQKFQPYPMEDITVVITLCRILDAFFDFMGKNGGFEQSDDLNDTSSKEANSQRESVTFKDIEKRDENTWYPEKNPDKLTKIIQKLFVFAFTWAFGGALNREDEHRENIPFCPSLEPDSLAKVTYDFDKLVHELFGNSSQVGINLPTGECSIFGYFVDIEQCEFIPWSDLVPNDQTLIQRGTSLLTNLQRSGGNFLKITECGECINYTATRDTTCLSFLMSLLLKNSCPVLLTGESGVGKTAAINQMLEKLEGPGAFDIKHGSILGDTLLYSEIKKSSSLKQNITILIPETHKTATGSSDNPTKKPEVRTNKKLLKNNDHKGVVVSTINFSTNVTAAKTKEMILKKLIRRTKDTLGAPKNNRILIFIDDMNMPVSDMYGAQPPLELIRQLLDLGGVYDTEKNTWKNIQDLSIVAACVPVVNDISPRLLKHFSMLVLPHPSQDILCTIFQAHLGIYFSINNFTPEVQKSKDQIISCSLAIYHQVRQNMLPTPTKCHYMFNLRDMFKLLLGLLQADRTVVNSKEMAALLFVHEATRVFHDRLIDFTDKSLFYRLLSRELENCFQIQWTQENLMNHSTVFLDFLDINKTHRKKIYQNTSDYNKLASVLDEFQMKLGSISLELSHSMVFFKEAIEHIIRATRVLRQPGSHMLLIGIDGCGKKTCATLACYLTDNKLYRVPISHKCAYIEFKEVFKKVFIHAGLKGKPTVLMVPNLNIEQDSFLEDLNYIISSGRIPDLFENVELDSIAMKIRYLTEQSGHMDNRQSLLSFFQKRIYKNLHIFVIMSPEGPSFRQNCRVYPSMISSCTIDWYERWPEEALLIVANSFLKEKVNFENRENLKEKLAPTCVQIHKSMKDLNRKYFEETGRFYYTTPNSYLQFMETFAHILRAREEEMQTKRDRFHMGLSTILEATTLVTEMQEELLILGPQVEQKTKETETLMEKLRKDSQVVEKVQMLVKQDEEIVAEEVRIVEDYAQKTANELKSVLPAFDKAIVALNALDKADVAELRVYTRPPFLVLTVMNAVCILLQKKPNWATAKLLLSETGFLKKLINLDKDSIPDKVFVKLKKIVTLPDFNPHKISLVSVACCSLCQWVIALNNYHEVQKVVGPKQIQVAEAQNVLKIARQRLAEKQRGLQLVEEHLLFLQAAYKDTVAEKQLLANRKTMASRRFQCASVLLTVLEDEKTRWQETINQIDNKLEGILGDILLSAACIVYSGILTPEFRQLIVNKWETFCIENGISLSSKFSLIKVMAQKYEISRWHNQGLPHGQYSVENAILIKNGQQWPLLIDPHRQAHKWIRQMEGSRLQKLSIEDSNYTKKIENAMKTGGSVLLQNLLETLAPGLKAILKKDIYQKKGHYFIRVGDAEFEYNSNFRLYLSTEIDNPHFLPSVYNFVTMINFTVTFQGLQDQLLSTVVTHEVPHLEDQRSKLLESISLDAITLEELEEKTLNLLQKALGSILDDDKIVDTLRKSKMTSNEISKRIEATKKAESEIQAIRKNYLPIATRGALLYFLVADLTQINYMYQFSLDWFHQVFVSSVVSKSKEQEHSFKREKVSPKEVHEFISISKEPNLENEKNLLDKHIKSAIDMLTKSIFKVVSSALFNEDKLCFSFRLCTVIMQNNANGNLIQDDIGFLPEEEWNIFLYSGILINIKSALSQSRLTSTFEIGESQHLQWLSDSRWRQCQYVSTHLEPFSLLCKSLLSNVSQWDTFKNSKAVYSLISTPFSSENASLEENTKPPEETELLNENKETCNPINFPWEKLTSFQRLILVKVLRPESLNNSVRKFITEKMGNKYLQRTGVNLKDAYKGSNARTPLILIQTHGIDLTNILLRFAQELKGTTHHVTIISLGRDQAAKAEDLILKALTKTQQWVFLQNCHLATSFMPRLCTIVESFNSPNVTIDPEFRLWLSSKSYSSFPIPVLKKGLKIAVESPQGLKSNLLQTFGCTGSGEVTEEIFENPDCGQWWKKLLFSLCFFNAVINERKNYGILGWNIAYKFNSSDLGVAIKVLENSLRGQPSISWQALRYLIGEVIYGGRVIDNWDKRCLKTLLYKFCNPEVLKDDFSFSSDGICLPVPGSASIKDYIHIIQSLPDDDLPEVLGIHPEAIRSCWETQGEKFIENLIAMQPKTTTANLMIRPEQSKDELVMEILSDLLKRLPLTVEKEEIAVGTPSTLKSMMSSSIWESLSKNLKDHDPLIHCVLLTFLKQEIKRFDKLLFVIHKSLKDLQLAIKGEIILTQELEEIFNSFLNMRVPTLWQKHAYRSCKPLSSWIDDLIQRLNFFNTWAKVAYTAIQRRYMRFVTVWKQSIPSTSQKCKHPEDSENNFFEGFPSRYWLPAFFFPQAFLAAVLQDYGRSRGIAVDALTFTHHVISNTTDKDEKFSVFMPKKLNIVRRAFKGSASSHTGVYIFGLFIEGARWNREQKILEDSLPLEMCCDFPDIYFLPTKISTKTPNASNQTDSELYAFECPVYQTPERSRILATTGLPTNFLTSVYLSTKKPPSHWITMRVALLCEKNEK

SEQ ID NO: 100252 - protein, 202 aa, Homo sapiens
  MOD_RES (1)..(1): Any amino acid
XNTTYSFLTTFFKEISEVFPDQFIHLGGDEVEFKCWVLDIIATINKGSIVWQEVFDDKAKLAPGTIVEVWKDSAYPEELSRVTASGFPVILSAPWYLDLISYGQDWRKYYKVEPLDFGGTQKQKQLFIGGEACLWGEYVDATNLTPRLWPRASAVGERLWSSKDVRDMDDAYDRLTRHRCRMVERGIAAQPLYAGYCNHENM

SEQ ID NO: 100253 - protein, 81 aa, Homo sapiens
MAAGRQQMDCDSRQPSALLTPPMSSSSRGPGAGARRRRTRCRRCRACVRTECGDCHFCRDMKKFGGPGRMKQSCLLRQCTA

SEQ ID NO: 100254 - protein, 253 aa, Homo sapiens
MRPLQIVPSRLISQLYCGLKPPASTRNQICLKMARPSSSMADFRKFFAKAKHIVIISGAGVSAESGVPTFRGAGGYWRKWQAQDLATPLAFAHNPSRVWEFYHYRREVMGSKEPNAGHRAIAECETRLGKQGRRVVVITQNIDELHRKAGTKNLLEIHGSLFKTRCTSCGVVAENYKSPICPALSGKGAPEPGTQDASIPVEKLPRCEEAGCGGLLRPHVVWFGENLDPAILEEVDRELAHCDLCLVVGHALP

SEQ ID NO: 100255 - protein, 103 aa, Homo sapiens
  MOD_RES (1)..(1): Any amino acid
XLGSTLMNIFSNILSSSDSDLLESSSEALKTIDELAFKIDLNSTSHVNITTRNLALSVSSLLPGTNAISNFSIGLPSNNESYFQLLSFTTCFEKTSKSAADGF

SEQ ID NO: 100256 - protein, 19 aa, Homo sapiens
  MOD_RES (1)..(1): Any amino acid
XDSNYQLIWGAGTKLIIKP

SEQ ID NO: 100257 - protein, 85 aa, Homo sapiens
MASSDIQVKELEKRASGQAFELILSPRSKESVPEFPLSPPKKKDLSLEEIQKKLEAAEERRKSHEAEVLKQLAEKREHEKEVLQK

SEQ ID NO: 100258 - protein, 144 aa, Homo sapiens
MAAVFLVTLYEYSPLFYIAVVFTCFIVTTGLVLGWFGWDVPVILRNSEETQFSTRVFKKQMRQVKNPFGLEITNPSSASITTGITLTTDCLEDSLLTCYWGCSVQKLYEALQKHVYCFRISTPQALEDALYSEYLYQEQYFTEN

SEQ ID NO: 100259 - protein, 509 aa, Homo sapiens
MSENEEEEISQQEGSGDYEVEEIPFGLEPQSPGFEPQSPEFEPQSPRFEPESPGFESRSPGLVPPSPEFAPRSPESDSQSPEFESQSPRYEPQSPGYEPRSPGYEPRSPGYESESSRYESQNTELKTQSPEFEAQSSKFQEGAEMLLNPEEKSPLNISVGVHPLDSFTQGFGEQPTGDLPIGPPFEMPTGALLSTPQFEMLQNPLGLTGALRGPGRRGGRARGGQGPRPNICGICGKSFGRGSTLIQHQRIHTGEKPYKCEVCSKAFSQSSDLIKHQRTHTGERPYKCPRCGKAFADSSYLLRHQRTHSGQKPYKCPHCGKAFGDSSYLLRHQRTHSHERPYSCTECGKCYSQNSSLRSHQRVHTGQRPFSCGICGKSFSQRSALIPHARSHAREKPFKCPECGKRFGQSSVLAIHARTHLPGRTYSCPDCGKTFNRSSTLIQHQRSHTGERPYRCAVCGKGFCRSSTLLQHHRVHSGERPYKCDDCGKAFSQSSDLIRHQRTHAAGRR

SEQ ID NO: 100260 - protein, 101 aa, Homo sapiens
MGLLTFRDVAIEFSLEEWQCLDTAQRNLYKNVILENYRNLVFLGIAVSKQDLITCLEQEKEPLTVKRHEMVNEPPESRPVVQPEVQWYNLCLLQPPPPRFK

SEQ ID NO: 100261 - protein, 731 aa, Homo sapiens
MDQGNDEEKINTVQRLLDQLPRANVVLLRYLFGVLHNIEQHSSSNQMTAFNLAVCVAPSILWPPASSSPELENEFTKKVSLLIQFLIENCLRIFGEEITSLFREVSVRCDTRENASDISCFQLNDSSYDSLENELNEDVDAPCSDLVKKLGQGSRSMDSVLTLSDYDLDQPEVEGLLTLSDFDLAHSKDEDVQMKRPLESKPVNILVYTKIPLRDHARAPSAMCTPSYLSTAAANAAKSLRRHRRCSEPSIDYLDSKLSYLREFYQKKLRKSSCDAILSQKDEDYLKQNQPLQEEGKTCFKQSLVTGTDVSKKNATTQNTKKKSLSGSEGNHVKLFPKSKPVAISVASYSPMSSQDHSKNQPFDVNTSGYSPPHTADALKGPRTHRRCSEPNIEDQNRKLTYLRGIYSKKQHKTSCEAGLLHGEEDYLKRHKSLQMEGQKLINQSLVMGIEVGKSSATNQNTEKVLPPRLNLCPRTSYSSLSSPGTSPSGSSVSSQDSAFSQISEHSVFTPTETSSPIDCTFQAQRKREDLSPDFSNASHVSGMPGPSSGQACSRPAYTKKDTMEWHSQMHSVTLHPSTWLRNGVASLKNWSLKKKAKAARPEEEKIASPKGPLEPPPHASGVPEANSLQEEQKDLPLRAAEGLSPVQSAQRCSSSPFQDSERHCSSPFSLVESRLKLCMKSHEEIEPGSQSSSGSLPWERASASSWTLEDATSPDSGPTVVCDIEDRNCC

SEQ ID NO: 100262 - protein, 623 aa, Homo sapiens
MKILNHPNIVKLFEVIETEKTLYLIMEYASGGEVFDYLVAHGRMKEKEARSKFRQIVSAVQYCHQKRIVHRDLKAENLLLDADMNIKIADFGFSNEFTVGGKLDTFCGSPPYAAPELFQGKKYDGPEVDVWSLGVILYTLVSGSLPFDGQNLKELRERVLRGKYRIPFYMSTDCENLLKRFLVLNPIKRGTLEQIMKDRWINAGHEEDELKPFVEPELDISDQKRIDIMVGMGYSQEEIQESLSKMKYDEITATYLLLGRKSSELDASDSSSSSNLSLAKVRPSSDLNNSTGQSPHHKVQRSVSSSQKQRRYSDHAGPAIPSVVAYPKRSQTSTADSDLKEDGISSRKSSGSAVGGKGIAPASPMLGNASNPNKADIPERKKSSTVPSSNTASGGMTRRNTYVCSERTTADRHSVIQNGKENSTIPDQRTPVASTHSISSAATPDRIRFPRGTASRSTFHGQPRERRTATYNGPPASPSLSHEATPLSQTRSRGSTNLFSKLTSKLTRSRNVSAEQKDENKEAKPRSLRFTWSMKTTSSMDPGDMMREIRKVLDANNCDYEQRERFLLFCVHGDGHAENLVQWEMEVCKLPRLSLNGVRFKRISGTSIAFKNIASKIANELKL

SEQ ID NO: 100263 - protein, 218 aa, Homo sapiens
MPTLGCFECCIKCLGGIPYASLIATILLYAGVALFCGCGHEALSGTVNILQTYFEMARTAGDTLDVFTMIDIFKYVIYGIAAAFFVYGILLMVEGFFTTGAIKDLYGDFKITTCGRCVSAWFIMLTYLFMLAWLGVTAFTSLPVYMYFNLWTICRNTTLVEGANLCLDLRQFGIVTIGEEKKICTVSENFLRMCESTELNMTFHLFIVALAGAGAAVI

SEQ ID NO: 100264 - protein, 74 aa, Homo sapiens
MATSRYEPVAEIGVGAYGTVYKARDPHSGHFVALKSVRVPNGGGGGGGLPISTVREVALLRRLEAFEHPNVVRI

SEQ ID NO: 100265 - protein, 17 aa, Homo sapiens
MSEIADLTFNTVAFTEV

SEQ ID NO: 100266 - protein, 118 aa, Homo sapiens
MAPQMYEFHLPLSPEELLKSGGVNQYVVQEVLSIKHLPPQLRAFQAAFRAQGPLAMLQHFDTIYSILHHFRSIDPGLKEDTLQFLIKVVSRHSQELPAILDDTTLSGSDRNAHLNALK

SEQ ID NO: 100267 - protein, 49 aa, Homo sapiens
MRHTNYSFSPWHGFTIHRAKFIQSQDYQCSALMGGRKVMSISIRLKVQK

SEQ ID NO: 100268 - protein, 228 aa, Homo sapiens; identical to SEQ ID NO: 6941

SEQ ID NO: 100269 - protein, 107 aa, Homo sapiens
QKMGKKQNGKSKKVEEAEPEEFVVEKVLDRRVVNGKVEYFLKWKGFTDADNTWEPEENLDCPELIEAFLNSQKAGKEKDGTKRKSLSDSESDDSKSKKKRDAMRKRD

SEQ ID NO: 100270 - protein, 201 aa, Homo sapiens
METVVIVAIGVLATIFLASFAALVLVCRQRYCRPRDLLQRYDSKPIVDLIGAMETQSEPSELELDDVVITNPHIEAILENEDWIEDASGLMSHCIAILKICHTLTEKLVAMTMGSGAKMKTSASVSDIIVVAKRISPRTTALLLSVSHLVLVTRNACHLTGGLDWIDQSLSAAEEHLEVLREAALASEPDKGLPGPEGFLQ

SEQ ID NO: 100271 - protein, 112 aa, Homo sapiens
MFFAHQLIPNSCATHALLSVLLNCSSVDLGPTLSRMKDFTKGFSPESKGYAIGNAPELAKAHNSHARPEPRHLPEKQNGLSAVRTMEAFHFVSYVPITGRLFELDGLKVYPI

SEQ ID NO: 100272 - protein, 1068 aa, Homo sapiens
MGHLPTGIHGARRLLPLLWLFVLFKNATAFHVTVQDDNNIVVSLEASDVISPASVYVVKITGESKNYFFEFEEFNSTLPPPVIFKASYHGLYYIITLVVVNGNVVTKPSRSITVLTKPLPVTSVSIYDYKPSPETGVLFEIHYPEKYNVFTRVNISYWEGKDFRTMLYKDFFKGKTVFNHWLPGMCYSNITFQLVSEATFNKSTLVEYSGVSHEPKQHRTENFTEYLMVDEEAHEFVAELKEPGKYKLSVTTFSSSGSCETRKSQSAKSLSFYISPSGEWIEELTEKPQHVSVHVLSSTTALMSWTSSQENYNSTIVSVVSLTCQKQKESQRLEKQYCTQVNSSKPIIENLVPGAQYQVVIYLRKGPLIGPPSDPVTFAIVPTGIKDLMLYPLGPTAVVLSWTRPYLGVFRKYVVEMFYFNPATMTSEWTTYYEIAATVSLTASVRIANLLPAWYYNFRVTMVTWGDPELSCCDSSTISFITAPVAPEITSVEYFNSLLYISWTYGDDTTDLSHSRMLHWMVVAEGKKKIKKSVTRNVMTAILSLPPGDIYNLSVTACTERGSNTSMLRLVKLEPAPPKSLFAVNKTQTSVTLLWVEEGVADFFEVFCQQVGSSQKTKLQEPVAVSSHVVTISSLLPATAYNCSVTSFSHDSPSVPTFIAVSTMVTEMNPNVVVISVLAILSTLLIGLLLVTLIILRKKHLQMARECGAGTFVNFASLERDGKLPYNWRRSIFAFLTLLPSCLWTDYLLAFYINPWSKNGLKKRKLTNPVQLDDFDAYIKDMAKDSDYKFSLQFEELKLIGLDIPHFAADLPLNRCKNRYTNILPYDFSRVRLVSMNEEEGADYINANYIPGYNSPQEYIATQGPLPETRNDFWKMVLQQKSQIIVMLTQCNEKRRVKCDHYWPFTEEPIAYGDITVEMISEEEQDDWACRHFRINYADEMQDVMHFNYTAWPDHGVPTANAAESILQFVHMVRQQATKSKGPMIIHCSAGVGRTGTFIALDRLLQHIRDHEFVDILGLVSEMRSYRMSMVQTEEQYIFIHQCVQLMWMKKKQQFCISDVIYENVSKS

SEQ ID NO: 100273 - protein, 293 aa, Homo sapiens
MVVREKILDLVISCFKRHGAKGMDTPAFELKETLTEKYGEDSGLMYDLKDQGGELLSLRYDLTVPFARYLAMNKVKKMKRYHVGKVWRRESPTIVQGRYREFCQCDFDIAGQFDPMIPDAECLKIMCEILSGLQLGDFLIKVNDRRIVDGMFAVCGVPESKFRAICSSIDKLDKMAWKDVRHEMVVKKGLAPEVADRIGDYVQCHGGVSLVEQMFQDPRLSQNKQALEGLGDLKLLFEYLTLFGIADKISFDLSLARGLDYYTGVIYEAVLLQTPTQAGEEPLNVGSVAAGGR

SEQ ID NO: 100274 - protein, 140 aa, Homo sapiens
MKLRRKTGYSFVNCKKALETCGGDLKQAEIWLHKEAQKEGWSKAAKLQGRKTKEGLIGLLQEGNTTVLVEVNCETDFVSRNLKFQLLVQQVALGTMMHCQTLKDQPSAYSKGFLNSSELSGLPAGPDREGSLKDQLALAI

SEQ ID NO: 100275 - protein, 75 aa, Homo sapiens
WWGSTVKKTMVCAGGYIRSGCNGDSGGPLNCPTEDGGWQVHGVTSFVSAFGCNFIWKPTVFTRVSAFIDWIEEGG

SEQ ID NO: 100276 - protein, 133 aa, Homo sapiens
MAVEGGMKCVKFLLYVLLLAFCACAVGLIAVGVGAQLVLSQTIIQGATPGSLLPVVIIAVGVFLFLVAFVGCCGACKENYCLMITFAIFLSLIMLVEVAAAIAGYVFRDKVMSEFNNNFRQQMENYPKNNHTA

SEQ ID NO: 100277 - protein, 94 aa, Homo sapiens
MEERTITIEIPEVLKKQLEDDCYYINRRKRLVKLPCQTNIITILESYVKHFAINAAFSANERPRHHHVMPHANMNVHYIPAEKNVDLCKEMVDG

SEQ ID NO: 100278 - protein, 190 aa, Homo sapiens
MQQALELALDRAEYVIESARQRPPKRKYLSSGRKSVFQKLYDLYIEECEKEPEVKQKLRRNVNLLEKLVMQETLSCLVVNLYPGNEGYSLMLRGKNGSDSETIRLPYEEGELLEYLDAEELPPILVDLLEKSQVNIFHCGCVIAEIRDYRQSSNMKSPGYQSRHILLRPTMQTLICDVHSITSDNHKWTQ

SEQ ID NO: 100279 - protein, 68 aa, Homo sapiens
MCETSAFYVPGVAPINFHQNDPVEIKAVKLTSSRTQLPYEYYSLPFCQPSKITYKAENLGSHEQREEV

SEQ ID NO: 100280 - protein, 218 aa, Homo sapiens
MTETREPAETGGYASLEEDDEDLSPGWKGVAQSWLKCSLELLGSSDPPASASREAGTTGPEHSSDSEYTLSEPDSEEEEDEEEEEEETTDDPEYDPGYKVKQRLGGGRGGPSRRAPRAAQPPAQPCQLCGRSPLGEAPPGTPPCRLCCPATAPQEAPAPEGRALGEEEEEPPRAGEGRPAGREEEEEEEEEGTYHCTECEDSFDNLGELHGHFMLHAR

SEQ ID NO: 100281 - protein, 708 aa, Homo sapiens
MRKHRHLPLVAVFCLFLSGFPTTHAQQQQADVKNGAAADIIFLVDSSWTIGEEHFQLVREFLYDVVKSLAVGENDFHFALVQFNGNPHTEFLLNTYRTKQEVLSHISNMSYIGGTNQTGKGLEYIMQSHLTKAAGSRAGDGVPQVIVVLTDGHSKDGLALPSAELKSADVNVFAIGVEDADEGALKEIASEPLNMHMFNLENFTSLHDIVGNLVSCVHSSVSPERAGDTETLKDITAQDSADIIFLIDGSNNTGSVNFAVILDFLVNLLEKLPIGTQQIRVGVVQFSDEPRTMFSLDTYSTKAQVLGAVKALGFAGGELANIGLALDFVVENHFTRAGGSRVEEGVPQVLVLISAGPSSDEIRYGVVALKQASVFSFGLGAQAASRAELQHIATDDNLVFTVPEFRSFGDLQEKLLPYIVGVAQRHIVLKPPTIVTQVIEVNKRDIVFLVDGSSALGLANFNAIRDFIAKVIQRLEIGQDLIQVAVAQYADTVRPEFYFNTHPTKREVITAVRKMKPLDGSALYTGSALDFVRNNLFTSSAGYRAAEGIPKLLVLITGGKSLDEISQPAQELKRSSIMAFAIGNKGADQAELEEIAFDSSLVFIPAEFRAAPLQGMLPGLLAPLRTLSGTPEESKRDILFLFDGSANLVGQFPVVRDFLYKIIDELNVKPEGTRIAVAQYSDDVKVESRFDEHQSKPEILNLVKRMKI

SEQ ID NO: 100282 - protein, 157 aa, Homo sapiens
IYVDRQLHNRQVKGDLYDVFLFAWQIYPPINVLPSLSRLMKSAIGEGMTRKDHGDVSNQLYACYAIGKDVQAMKAVVGEEALTSEDLLYLEFLQKFEKNFINQGPYENRSVFESLDLGWKLLRIFPKEMLKRIPQAVIDEFYSREGALQDLAPDTAL

SEQ ID NO: 100283 - protein, 79 aa, Homo sapiens
MASPRTRKVLKEVRVQDENNVCFECGAFNPQWVSVTYGIWICLECSGRHRGLGVHLSFVRSVTMDKWKDIELEKMKAGG

SEQ ID NO: 100284 - protein, 393 aa, Homo sapiens
MPRVKAAQAGRQSSAKRHLAEQFAVGEIITDMAKKEWKVGLPIGQGGFGCIYLADMNSSESVGSDAPCVVKVEPSDNGPLFTELKFYQRAAKPEQIQKWIRTRKLKYLGVPKYWGSGLHDKNGKSYRFMIMDRFGSDLQKIYEANAKRFSRKTVLQLSLRILDILEYIHEHEYVHGDIKASNLLLNYKNPDQVYLVDYGLAYRYCPEGVHKEYKEDPKRCHDGTIEFTSIDAHNGVAPSRRGDLEILGYCMIQWLTGHLPWEDNLKDPKYVRDSKIRYRENIASLMDKCFPEKNKPGEIAKYMETVKLLDYTEKPLYENLRDILLQGLKAIGSKDDGKLDLSVVENGGLKAKTITKKRKKEIEESKEPGVEDTEWSNTQTEEAIQTRKLNSFA

SEQ ID NO: 100285 - protein, 180 aa, Homo sapiens
MPKVFSVYFVCLCPALGKICDISGQEMNLLLMKSLDALENCCFDTSLEYNTGCILGVGLVLSLMSHSSQMQSRVHVAALLRKLSAHVDDSGSQSRTFQEVLAYTLSCVCTSAFSAGIIEATEAEDVMNKLRLLVENSQQTSGFALALGNIVHGLSVCGHGKAEDLGSKLLPAWIRIVLTE

SEQ ID NO: 100286 - protein, 199 aa, Homo sapiens
MGEASPPAPARRHLLVLLLLLSTLVIPSAAAPIHDADAQESSLGLTGLQSLLQGFSRLFLKGNLLRGIDSLFSAPMDFRGLPGNYHKEENQEHQLGNNTLSSHLQIDKVPRMEEKEALVPIQKATDSFHTELHPRVAFWIIKLPRRRSHQDALEGGHWLSEKRHRLQAIRDGLRKGTHKDVLEEGTESSSHSRLSPRKT

SEQ ID NO: 100287 - protein, 166 aa, Homo sapiens
MDHLNEATQGKEHSEMSNNVSDPKGPPAKIARLEQNGSPLGRGRLGSTGAKMQGVPLKHSGHLMKTNLRKGTMLPVFCVVEHYENAIEYDCKEEHAEFVLVRKDMLFNQLIEMALLSLGYSHSSAAQAKGLIQVGKWNPVPLSYVTDAPDATVADMLQDVYHVVTL

SEQ ID NO: 100288 - protein, 243 aa, Homo sapiens
MARRGPGWRPLLLLVLLAGAAQGGLYFRRGQTCYRPLRGDGLAPLGRSTYPRPHEYLSPADLPKSWDWRNVDGVNYASITRNQHIPQYCGSCWAHASTSAMADRINIKRKGAWPSTLLSVQNVIDCGNAGSCEGGNDLSVWDYAHQHGIPDETCNNYQAKDQECDKFNQCGTCNEFKECHAIRNYTLWRVGDYGSLSGREKMMAEIYANGPIRLEYNDTIMAHCSLPSTWDYSLICTQQTSGK

SEQ ID NO: 100289 - protein, 43 aa, Homo sapiens
MPSPDSMTFEDIIVDFTQEEWALLDTSQRKLFQDVMLENISHL

SEQ ID NO: 100290 - protein, 62 aa, Homo sapiens
  MOD_RES (1)..(1): Any amino acid
XFVHHLRNALDVLHREVPRVLVNLVDFLNPTIMRQVFLGNPDKCPVQQASLNHLEAKQRPWT

SEQ ID NO: 100291 - protein, 53 aa, Homo sapiens
MKDIDIGKEYIIPSPGYRSVRERTSTSGTHRDREDSKFRRTRPSQSLTLSPRL

SEQ ID NO: 100292 - protein, 42 aa, Homo sapiens
MNHTVQTFFSPVNSGQPPNYEMLKEEHEEAGWLAQSLSPAIH

SEQ ID NO: 100293 - protein, 979 aa, Homo sapiens
TYVRLENGEPRGLPIIQDVMLAEAQWRPEESEDYETTISGLTPETTYSVTVAAYTTKGDGARSKPKIVTTTGAVFAKNFRVAAAMKTSVLLSWEVPDSYKSAVPFKILYNGQSVEVDGHSMRKLIADLQPNTEYSFVLMNRGSSAGGLQHLVSIRTAPDLLPHKPLPASAYIEDGRFDLSMPHVQDPSLVRWFYIVVVPIDRVGGSMLTPRWSTPEELELDELLEAIEQGGEEQRRRRRQAERLKPYVAAQLDVLPETFTLGDKKNYRGFYNRPLSPDLSYQCFVLASLKEPMDQKRYASSPYSDEIVVQVTPAQQQEEPEMLWVTGPVLAVILIILIVIAILLFKRKRTHSPSSKDEQSIGLKDSLLAHSSDPVEMRRLNYQTPGSSVPSCPNTSSMRDHPPIPITDLADNIERLKANDGLKFSQEYESIDPGQQFTWENSNLEVNKPKNRYANVIAYDHSRVILTSIDGVPGSDYINANYIDGYRKQNAYIATQGPLPETMGDFWRMVWEQRTATVVMMTRLEEKSRVKCDQYWPARGTETCGLIQVTLLDTVELATYTVRTFALHKSGSSEKRELRQFQFMAWPDHGVPEYPTPILAFLRRVKACNPLDAGPMVVHCSAGVGRTGCFIVIDAMLERMKHEKTVDIYGHVTCMRSQRNYMVQTEDQYVFIHEALLEAATCGHTEVPARNLYAHIQKLGQVPPGESVTAMELEFKLLASSKAHTSRFISANLPCNKFKNRLVNIMPYELTRVCLQPIRGVEGSDYINASFLDGYRQQKAYIATQGPLAESTEDFWRMLWEHNSTIIVMLTKLREMGREKCHQYWPAERSARYQYFVVDPMAEYNMPQYILREFKVTDARDGQSRTIRQFQFTDWPEQGVPKTGEGFIDFIGQVHKTKEQFGQDGPITVHCSAGVGRTGVFITLSIVLERMRYEGVVDMFQTVKTLRTQRPAMVQTEDQYQLCYRAALEYLGSFDHYAT

SEQ ID NO: 100294 - protein, 75 aa, Homo sapiens
MAIPITVLDCDLLLYGRGHRTLDRFKLDDVTDEYLMSMYGFPRQFIYYLVELLGANLSRPTQRSRAISPETQVLA

SEQ ID NO: 100295 - protein, 166 aa, Homo sapiens
MDQFPESVTENFEYDDLAEACYIGDIVVFGTVFLSIFYSVIFAIGLVGNLLVVFALTNSKKPKSVTDIYLLNLALSDLLFVATLPFWTHYLINEKGLHNAMCKFTTAFFFIGFFGSIFFITVISIDRYLAIVLAANSMNNRTVQHGVTISLGVWAAAILVAAPQFM

SEQ ID NO: 100296 - protein, 62 aa, Homo sapiens
RRMDTDVVKLIESKHEVTILGGLNEFVVKFYGPQGTPYEGGVWKVRVDLPDKYPFKSPSIEL

SEQ ID NO: 100297 - protein, 85 aa, Homo sapiens
TVPPSSWPLPSSMARRHWRPSAERGVIAGSPAPPELIRAIINKINMKDLVKSQEEIAAWEDGQQSTDVLLERPGRLLMEPQRTVP

SEQ ID NO: 100298 - protein, 159 aa, Homo sapiens
  MOD_RES (1)..(1): Any amino acid
XRLPLQCVLWGCLLTAVHPEPPTACREKQYLINSQCCSLCQPGQKLVSDCTEFTETECLPCGESEFLDTWNRETHCHQHKYCDPNLGLRVQQKGTSETDTICTCEEGWHCTSEACESCVLHRSCSPGFGVKQIAVRPKTWLCNRQAQTRLMLSVVPRIG

SEQ ID NO: 100299 - protein, 55 aa, Homo sapiens
MSMEDYDFLFKIVLIGNAGVGKTCLVRRFTQGLFPPGQGATIGVDFMIKTVEING

SEQ ID NO: 100300 - protein, 39 aa, Homo sapiens
LISADDEMEESDVEEDLRRLTPLKPVKKKKHRFGLPGPE

SEQ ID NO: 100301 - protein, 125 aa, Homo sapiens
MRSKGRARKLATKGPCFPFAFHHNCKFPEASPATQNYNECVYGNYPEIPLEEMPDADGVASTPSLNIQEPCSPATSSEAFTPKEGSPYKAPIYIPDDIPIPAEFELRESNMPGAGLGIWTKRKIE

SEQ ID NO: 100302 - protein, 528 aa, Homo sapiens
RLFWNEVRPFDWPCKNNRRCREFLWSKLEPIKVDTSRLEHLFESKSKELSVSKKTAADGKRQEIIVLDSKRSNAINIGLTVLPPPRTIKIAILNFDEYALNKEGIEKILTMIPTDEEKQKIQEAQLANPEIPLGSAEQFLLTLSSISELSARLHLWAFKMDYETTEKEVAEPLLDLKEGIDQLENNKTLGFILSTLLAIGNFLNGTNAKAFELSYLEKVPEVKDTVHKQSLLHHVCTMVVENFPDSSDLYSEIGAITRSAKVDFDQLQDNLCQMERRCKASWDHLKAIAKHEMKPVLKQRMSEFLKDCAERIIILKIVHRRIINRFHSFLLFMGHPPYAIREVNINKFCRIISEFALEYRTTRERVLQQKQKRANHRERNKTRGKMITDSGKFSGSSPAPPSQPQGLSYAEDAAEHENMKAVLKTSSPSVEDATPALGVRTRSRASRGSTSSWTMGTDDSPNVTDDAADEIMDRIVKSATQVPSQRVVPRERKRSRANRKSLRRTLKSGLTPEEARALGLVGTSELQL

SEQ ID NO: 100303 - protein, 92 aa, Homo sapiens
RAAKAPNVVLVVSDSFDGRLTFHPGSQVVKLPFINFMKTRGTSFLNAYTNSPICCPSRAVIVWKRGQEMLLSYSDKKAGPWLILSVTGLKSE

SEQ ID NO: 100304 - protein, 127 aa, Homo sapiens
  MOD_RES (1)..(1): Any amino acid
XPVLPQLIIPIKNALNLRNRQVICVTLKVLQHLVVSAEMVGKALVPYYRQILPVLNIFKNMNVTHRQRSELSSMLAKWGGPDLLLVFLPFSTIIVCKSLIFILSQFMLPRLNSATNNMNVTHFIICN

SEQ ID NO: 100305 - protein, 226 aa, Homo sapiens
MDWKEVLRRRLATPNTCPNKKKSEQELKDEEMDLFTKYYSEWKGGRKNTNEFYKTIPRFYYRLPAEDEVLLQKLREESRAVFLQRKSRELLDNEELQVGEKAGAKCKQFFTAKVFAKLLHTDSYGRISIMQFFNYVMRKVWLHQTRIGLSLYDVAGQGYLRESDLENYILELIPTLPQLDGLEKSFYSFYVCTAVRKFFFFLDPLRTGKIKIQDILACSFLDDLLE

SEQ ID NO: 100306 - protein, 104 aa, Homo sapiens
MAEGGGPEPGEQERRSSGPRPPSARDLQLALAELYEDEVKCKSSKSNRPKATVFKSPRTPPQRHLQVEDTDWVVLFVSGLNISMEKISCKMFRFCLNCGAMVSV

SEQ ID NO: 100307 - protein, 51 aa, Homo sapiens
MPRNSGAGYGCPHGDPSMLDSRETPQESRQDMIVRTTQEKLKTRSGNSCHI

SEQ ID NO: 100308 - protein, 51 aa, Homo sapiens
  MOD_RES (1)..(1): Any amino acid
XQGVLLVYDITNYQSFENLEDWYTVVKKVSEESETQPLVALVGNKRKQHGL

SEQ ID NO: 100309 - protein, 421 aa, Homo sapiens
MADKLTRIAIVNHDKCKPKKCRQECKKSCPVVRMGKLCIEVTPQSKIAWISETLCIGCGICIKKCPFGALSIVNLPSNLEKETTHRYCANAFKLHRLPIPRPGEVLGLVGTNGIGKSTALKILAGKQKPNLGKYDDPPDWQEILTYFRGSELQNYFTKILEDDLKAIIKPQYVDQIPKAAKGTVGSILDRKDETKTQAIVCQQLDLTHLKERNVEDLSGGELQRFACAVVCIQKADIFMFDEPSSYLDVKQRLKAAITIRSLINPDRYIIVVEHDLSVLDYLSDFICCLYGVPSAYGVVTMPFSVREGINIFLDGYVPTENLRFRDASLVFKVAETANEEEVKKMCMYKYPGMKKKMGEFELAIVAGEFTDSEIMVMLGENGTGKTTFIRMLAGRLKPDEGGEVPVLNVSYKPQKISPKST

SEQ ID NO: 100310 - protein, 122 aa, Homo sapiens
MVDSTEYEVASQPEVETSPLGDGASPGPEQVKLKKEISLLNGVCLIVGNMIGSGIFVSPKGVLIYSASFGLSLVIWAVGGLFSVFGALCYAELGTTIKKSGASYAYILEAFGGFLAFIRLWT

SEQ ID NO: 100311 - protein, 86 aa, Homo sapiens
  MOD_RES (1)..(1): Any amino acid
XVRMALEGMSKRKRKRSVQEGENPDDGVRGSPPEDYRLGQVASSLFRGEHHSRGGTGRLASLFSSLEPQIQPVYVPVPKGKRSSEC

SEQ ID NO: 100312 - protein, 116 aa, Homo sapiens
MAEKVNNFPPLPKFIPLKPCFYQDFEADIPPQHVSMTKRLYYLWMLNSVTLAVNLVGCLAWLIGGGGATNFGLAFLWLILFTPCSYVCWFRPIYKAFKTDSSFSFMAFFFTFMAQL

SEQ ID NO: 100313 - protein, 36 aa, Homo sapiens
  MOD_RES (1)..(1): Any amino acid
XARLLCAEMPKKAGATTKASSRVKARARNQRDHFLP

SEQ ID NO: 100314 - protein, 191 aa, Homo sapiens
MKAKEERRVTELKSQMKSELAAVASEFGRLTRFLAEEQAGLERRLREMHEAQLGRAGAAASRLAEQAAQLSRLLAEAQERSQQGGLRLLQDIKETFNRCEEVQLQPPEVWSPDPCQPHSHDFLTDAIVRKMSRMFCQAARVDLTLDPDTAHPALMLSPDRRGVRLAERRQEVADHPKRFSADCCVLGAQGF

SEQ ID NO: 100315 - protein, 211 aa, Homo sapiens
MVPALRYLVGACGRARGLFAGGSPGACGFASGRPRPLCGGSRSASTSSFDIVIVGGGIVGLASARALILRHPSLSIGVLEKEKDLAVHQTGHNSGVIHSGIYYKPESLKAKLCVQGAALLYEYCQQKGISYKQCGKLIVAVEQEEIPRLQALYEKGLQNGVPGLRLIQQEDIKKKEPYCRISSCVSITYQKTIIFPLCCSIAFMISGSNGY

SEQ ID NO: 100316 - protein, 172 aa, Homo sapiens
MAPKKPEPKKEAAKPAPAPAPAPAPAPAPAPEAPKEPAFDPKSVKIDFTADQIEEFKEAFSLFDRTPTGEMKITYGQCGDVLRALGQNPTNAEVLRVLGKPKPEEMNVKMLDFETFLPILQHISRNKEQGTYEDFVEGLRVFDKESNGTVMGAELRHVLATLGEKMTEAEVE

SEQ ID NO: 100317 - protein, 156 aa, Homo sapiens
MLVLNCSTKLLILEKMLKSCFPESLKVYGAVMNINRGNPFQKEVVLDSWPDFKAVITRRQREAETDNLDHYTNAYAVFYKDVRAYRQLLEECDVFNWDQVFQIQGLQSELYDVSKAVANSKQLNIKLTSFKAVHFSPVSSLPDTSFLKGPSPRLTY

SEQ ID NO: 100318 - protein, 163 aa, Homo sapiens
MFISFYDFKNIPQDSRCDGQLFINGRNNKNNSISLYFQGGLRHASASIGGSEAYRHMKFEGGVHRVQRVPKTEKQGRVHTSTMTVAILPQPTEINLVINPKDLRIDTKRASGAGGQHVNTTDSAVRIVHLPTGVVSECQQERSQLKNKELAMTKLRAKLYSMH

SEQ ID NO: 100319 - protein, 78 aa, Homo sapiens
  MOD_RES (1)..(1): Any amino acid
XALQHNLGIGGAVVVTLYKMGFPEAASSFRTHQIEAVPTSSASDGFKANLVFKEIEKKLEEIRRLTAQSQWLTQTSWL

SEQ ID NO: 100320 - protein, 199 aa, Homo sapiens
MAFLAGPRLLDWASSPPHLQFNKFVLTGYRPASSGSGCLRSLFYLHNELGNIYTHGALPIIHCTLACRPWLRPAALVGYTVLSGVAGWRALTAPSTSARLRAFGWQAAARLLVFGARGVGLGSGAPGSLPCYLRMDALALLGGLVNVARLPERWGPGRFDYWGNSHQIMHLLSVGSILQLHAGVVPDLLWAAHHACPRD

SEQ ID NO: 100321 - protein, 270 aa, Homo sapiens
MSGHSPTRGAMQVAMNGKARKEAVQTAAKELLKFVNRSPSPFHAVAECRNRLLQAGFSELKETEKWNIKPESKYFMTRNSSTIIAFAVGGQYVPGNGFSLIGAHTDSPCLRVKRRSRRSQVGFQQVGVETYGGGIWSTWFDRDLTLAGRVIVKCPTSGRLEQQLVHVERPILRIPHLAIHLQRNINENFGPNTEMHLCALLAIPPQPTSPHRVPILATAIQEELEKGTPEPGPLNAVDERHHSVLMSLLCAHLGLSPKDIVEMELCLADT

SEQ ID NO: 100322 - protein, 95 aa, Homo sapiens
  MOD_RES (1)..(1): Any amino acid
XLFWIYSSCIEDSHRGAIGLRIALAISAIAVFLVLVSACILRFGTRSLCNSIISLNTTISCSEAQKIPWTPPGTALQFYSNLHNAEVRPKDRRKN

SEQ ID NO: 100323 - protein, 3895 aa, Homo sapiens
MTTMLQKSDSNASFLRAARAGNLDKVVEYLKGGIDINTCNQNGLNALHLAAKEGHVGLVQELLGRGSSVDSATKKGNTALHIASLAGQAEVVKVLVKEGANINAQSQNGFTPLYMAAQENHIDVVKYLLENGANQSTATEDGFTPLAVALQQGHNQAVAILLENDTKGKVRLPALHIAARKDDTKSAALLLQNDHNADVQSKSGFTPLHIAAHYGNVNVATLLLNRGAAVDFTARNGITPLHVASKRGNTNMVKLLLDRGGQIDAKTRDGLTPLHCAARSGHDQVVELLLERGAPLLARTKNGLSPLHMAAQGDHVECVKHLLQHKAPVDDVTLDYLTALHVAAHCGHYRVTKLLLDKRANPNARALNGFTPLHIACKKNRIKVMELLVKYGASIQAITESGLTPIHVAAFMGHLNIVLLLLQNGASPDVTNIRGETALHMAARAGQVEVVRCLLRNGALVDARAREEQTPLHIASRLGKTEIVQLLLQHMAHPDAATTNGYTPLHISAREGQVDVASVLLEAGAAHSLATKKGFTPLHVAAKYGSLDVAKLLLQRRAAADSAGKNGLTPLHVAAHYDNQKVALLLLEKGASPHATAKNGYTPLHIAAKKNQMQIASTLLNYGAETNIVTKQGVTPLHLASQEGHTDMVTLLLDKGANIHMSTKSGLTSLHLAAQEDKVNVADILTKHGADQDAHTKLGYTPLIVACHYGNVKMVNFLLKQGANVNAKTKNGYTPLHQAAQQGHTHIINVLLQHGAKPNATTANGNTALAIAKRLGYISVVDTLKVVTEEVTTTTTTITEKHKLNVPETMTEVLDVSDEEGDDTMTGDGGEYLRPEDLKELGDDSLPSSQFLDGMNYLRYSLEGGRSDSLRSFSSDRSHTLSHASYLRDSAVMDDSVVIPSHQVSTLAKEAERNSYRLSWGTENLDNVALSSSPIHSGFLVSFMVDARGGAMRGCRHNGLRIIIPPRKCTAPTRVTCRLVKRHRLATMPPMVEGEGLASRLIEVGPSGAQFLGPVIVEIPHFAALRGKERELVVLRSENGDSWKEHFCDYTEDELNEILNGMDEVLDSPEDLEKKRICRIITRDFPQYFAVVSRIKQDSNLIGPEGGVLSSTVVPQVQAVFPEGALTKRIRVGLQAQPMHSELVKKILGNKATFSPIVTLEPRRRKFHKPITMTIPVPKASSDVMLNGFGGDAPTLRLLCSITGGTTPAQWEDITGTTPLTFVNECVSFTTNVSARFWLIDCRQIQESVTFASQVYREIICVPYMAKFVVFAKSHDPIEARLRCFCMTDDKVDKTLEQQENFAEVARSRDVEVLEGKPIYVDCFGNLVPLTKSGQHHIFSFFAFKENRLPLFVKVRDTTQEPCGRLSFMKEPKSTRGLVHQAICNLNITLPIYTKESESDQEQEEEIDMTSEKNDETESTETSVLKSHLVNEVPVLASPDLLSEVSEMKQDLIKMTAILTTDVSDKAGSIKVKELVKAAEEEPGEPFEIVERVKEDLEKVNEILRSGTCTRDESSVQSSRSERGLVEEEWVIVSDEEIEEARQKAPLEITEYPCVEVRIDKEIKGKVEKDSTGLVNYLTDDLNTCVPLPKEQLQTVQDKAGKKCEALAVGRSSEKEGKDIPPDETQSTQKQHKPSLGIKKPVRRKLKEKQKQKEEGLQASAEKAELKKGSSEESLGEDPGLAPEPLPTVKATSPLIEETPIGSIKDKVKALQKRVEDEQKGRSKLPIRVKGKEDVPKKTTHRPHPAASPSLKSERHAPGSPSPKTERHSTLSSSAKTERHPPVSPSSKTEKHSPVSPSAKTERHSPASSSSKTEKHSPVSPSTKTERHSPVSSTKTERHPPVSPSGKTDKRPPVSPSGRTEKHPPVSPGRTEKRLPVSPSGRTDKHQPVSTAGKTEKHLPVSPSGKTEKQPPVSPTSKTERIEETMSVRELMKAFQSGQDPSKHKTGLFEHKSAKQKQPQEKGKVRVEKEKGPILTQREAQKTENQTIKRGQRLPVTGTAESKRGVRVSSIGVKKEDAAGGKEKVLSHKIPEPVQSVPEEESHRESEVPKEKMADEQGDMDLQISPDRKTSTDFSEVIKQELEDNDKYQQFRLSEETEKAQLHLDQVLTSPFNTTFPLDYMKDEFLPALSLQSGALDGSSESLKNEGVAGSPCGSLMEGTPQISSEESYKHEGLAETPETSPESLSFSPKKSEEQTGETKESTKTETTTEIRSEKEHPTTKDITGGSEERGATVTEDSETSTESFQKEATLGSPKDTSPKRQDDCTGSCSVALAKETPTGLTEEAACDEGQRTFGSSAHKTQTDSEVQESTATSDETKALPLPEASVKTDTGTESKPQGVIRSPQGLELALPSRDSEVLSAVADDSLAVSHKDSLEASPVLEDNSSHKTPDSLEPSPLKESPCRDSLESSPVEPKMKAGIFPSHFPLPAAVAKTELLTEVASVRSRLLRDPDGSAEDDSLEQTSLMESSGKSPLSPDTPSSEEVSYEVTPKTTDVSTPKPAVIHECAEEDDSENGEKKRFTPEEEMFKMVTKIKMFDELEQEAKQKRDYKKEPKQEESSSSSDPDADCSVDVDEPKHTGSGEDESGVPVLVTSESRKVSSSSESEPELAQLKKGADSGLLPEPVIRVQPPSPLPSSMDSNSSPEEVQFQPVVSKQYTFKMNEDTQEEPGKSEEEKDSESHLAEDRHAVSTEAEDRSYDKLNRDTDQPKICDGHGCEAMSPSSSAAPVSSGLQSPTGDDVDEQPVIYKESLALQGTHEKDTEGEELDVSRAESPQADCPSESFSSSSSLPHCLVSEGKELDEDISATSSIQKTEVTKTDETFENLPKDCPSQDSSITTQTDRFSMDVPVSDLAENDEIYDPQITSPYENVPSQSFFSSEESKTQTDANHTTSFHSSEVYSVTITSPVEDVVVASSSSGTVLSKESNFEGQDIKMESQQESTLWEMQSDSVSSSFEPTMSATTTVVGEQISKVIITKTDVDSDSWSEIREDDEAFEARVKEEEQKIFGLMVDRQSQGTTPDTTPARTPTEEGTPTSEQNPFLFQEGKLFEMTRSGAIDMTKRSYADESFHFFQIGQESREETLSEDVKEGATGADPLPLETSAESLALSESKETVDDEADLLPDDVSEEVEEIPASDAQLNSQMGISASTETPTKEAVSVGTKDLPTVQTGDIPPLSGVKQISCPDSSEPAVQVQLDFSTLTRSVYSDRGDDSPDSSPEEQKSVIEIPTAPMENVPFTESKSKIPVRTMPTSTPAPPSAEYESSVSEDFLSSVDEENKADEAKPKSKLPVKVPLQRVEQQLSDLDTSVQKTVAPQGQDMASIAPDNRSKSESDASSLDSKTKCPVKTRSYTETETESRERAEELELESEEGATRPKILTSRLPVKSRSTTSSCRGGTSPTKESKEHFFDLYRNSIEFFEEISDEASKLVDRLTQSEREQEIVSDDESSSALEVSVIENLPPVETEHSVPEDIFDTRPIWDESIETLIERIPDENGHDHAEDPQDEQERIEERLAYIADHLGFSWTELARELDFTEEQIHQIRIENPNSLQDQSHALLKYWLERDGKHATDTNLVECLTKINRMDIVHLMETNTEPLQERISHSYAEIEQTITLDHSEGFSVLQEELCTAQHKQKEEQAVSKESETCDHPPIVSEEDISVGYSTFQDGVPKTEGDSSATALFPQTHKEQVQQDFSGKMQDLPEESSLEYQQEYFVTTPGTETSETQKAMIVPSSPSKTPEEVSTPAEEEKLYLQTPTSSERGGSPIIQEPEEPSEHREESSPRKTSLVIVESADNQPETCERLDEDAAFEKGDDMPEIPPETVTEEEYIDEHGHTVVKKVTRKIIRRYVSSEGTEKEEIMVQGMPQEPVNIEEGDGYSKVIKRVVLKSDTEQSEDNNE

SEQ ID NO: 100324 - protein, 153 aa, Homo sapiens
QALYGTIPQIFGKGECARVRTGCFVVQVANMMIRMKREFTGSQNSIFPVFDNLLLLDRNVDLLTPLATQLTYEGLIDEIYGIQNSYVKLPPEKFAPKKQGDGGKDLPTEAKKLQLNSAEELYAEIRDKNFNAVGSVLSKKAKIISAAFEERHN

SEQ ID NO: 100325 - protein, 2062 aa, Homo sapiens
MDGCLDTETPTVSIQENVDVASLKPISDSGINFTDAIWSPTCERRTCECHESIEKNKDKTDLPQSVVYQNEEGRWVTDLAYYTSFNSKQNLNVSLSDEMNEDFRSGSEAFDLIAQDEEEFNKEHQFIQPSFGYFIRSPEKREPIALIRKSDVSRGNLEKEMAHLNHDLYSGDLNEQSQAQLSEGSITLQVEAVESTSQVDENDVTLTADKGKTEDTFFMSNKPQRYKDKLPDSGDSMLRISTIASAIAEASVNTDPSQLAAMIKALSNKTRDKTFQEDEKQKDYSHVRHFLPNDLEKSNGSNALDMEKYLKKTEVSRYESALENFSRASMSDTWDLSLPKEQTTQDIHPVDLSATSVSVRAPEENTAAIVYVENGESENQESFRTINSSNSVTNRENNSAVVDVKTCSIDNKLQDVGNDEKATSISTPSDSYSSVRNPRITSLCLLKDCEEIRDNRENQRQNECVSEISNSEKHVTFENHRIVSPKNSDLKNTSPEHGGRGSEDEQESFRPSTSPLSHSSPSEISGTSSSGCALESFGSAAQQQQPPCEQELSPLVCSPAGVSRLTYVSEPESSYPTTATDDALEDRKSDITSELSTTIIQGSPAALEERAMEKLREKVPFQNRGKGTLSSIIQNNSDTRKATETTSLSSKPEYVKPDFRWSKDPSSKSGNLLETSEVGWTSNPEELDPIRLALLGKSGLSCQVGSATSHPVSCQEPIDEDQRISPKDKSTAGREFSGQVSHQTTSENQCTPIPSSTVHSSVADMQNMPAAVHALLTQPSLSAAPFAQRYLGTLPSTGSTTLPQCHAGNATVCGFSGGLPYPAVAGEPVQNSVAVGICLGSNIGSGWMGTSSLCNPYSNTLNQNLLSTTKPFPVPSVGTNCGIEPWDSGVTSGLGSVRVPEELKLPHACCVGIASQTLLSVLNPTDRWLQVSIGVLSISVNGEKVDLSTYRCLVFKNKAIIRPHATEEIKVLFIPSSPGVFRCTFSVASWPCSTDAETIVQAEALASTVTLTAIAESPVIEVETEKKDVLDFGDLTYGGWKALPLKLINRTHATVPIRLIINANAVAWRCFTFSKESVRAPVEVAPCADVVTRLAGPSVVNHMMPASYDGQDPEFLMIWVLFHSPKKQISSSDILDSAEEFSAKVDIEVDSPNPTPVLRSVSLRARAGIARIHAPRDLQTMHFLAKVASSRKQHLPLKNAGNIEVYLDIKVPEQGSHFSVDPKNLLLKPGEEHEVIVSFTPKDPEACEERILKIFVQPFGPQYEVVLKGEVISSGSKPLSPGPCLDIPSILSNKQFLAWGGVPLGRTQLQKLALRNNSASTTQHLRLLIRGQDQDCFQLQNTFGSEQRLTSNCEIRIHPKEDIFISVLFAPTRLSCMLARLEIKQLGNRSQPGIKFTIPLSGYGGTSNLILEGVKKLSDSYMVTVNGLVPGKESKIVFSVRNTGSRAAFVKAVGFKDSQKKVLLDPKVLRIFPDKFVLKERTQENVTLIYNPSDRGINNKTATELSTVYLFGGDEISRQQYRRALLHKPEMIKQILPEHSVLQNINFVEAFQDELLVTEVYDLPQRPNDVQLFYGSMCKIILSVIGEFRDCISSREFLQPSSKASLESTSDLGASGKHGGNVSLDVLPVKGPQGSPLLSRAARPPLDQLASEEPWTVLPEHLILVAPSPCDMAKTGRFQIVNNSVRLLRFELCWPAHCLTVTPQHGCVAPESKLQILVSPNSSLSTKQSMFPWSGLIYIHCDDGQKKIVKVQIREDLTQVELLTRLTSKPFGILSPVSEPSVSHLVKPMTKPPSTKVEIRNKSITFPTTEPGETSESCLELENHGTTDVKWHLSSLAPPYVKGVDESGDVFRATYAAFRCSPISGLLESHGIQKVSITFLPRGRGDYAQFWDVECHPLKEPHMKHTLRFQLSGQSIEAENEPENACLSTDSLIKIDHLVKPRRQAVSEASARIPEQLDVTARGVYAPEDVYRFRPTSVGESRTLKVNLRNNSFITHSLKFLSPREPFYVKHSKYSLRAQHYINMPVQFKPKSAGKFEALLVIQTDEGKSIAIRLIGEALGKN

SEQ ID NO: 100326 - protein, 21 aa, Homo sapiens
MNPASAPPPLPPPGQQVIHVT

SEQ ID NO: 100327 - protein, 162 aa, Homo sapiens
  MOD_RES (1)..(1): Any amino acid
XARTLRAFSTAVYSATPVPTPSLPERTPGNERPPRRKALPPRTEKMAVDQDWPSVYPVAAPFKPSAVPLPVRMGYPVKKGVPMAKEGNLELLKIPNFLHLTPVAIKKHCEALKDFCTEWPAALDSDEKCEKHFPIEIDSTDYVSSGPSVRNPRARVVVLREM

SEQ ID NO: 100328 - protein, 118 aa, Homo sapiens
MEESHFNSNPYFWPSIPTVSGQIENTMFINKMKDQLLPEKGCGLAPPHYPTLLTVPASVSLPSGISMDTESKSDQLTPHSQASVTQNITVVPVPSTGLMTAGVSCSQRWRREGSQSRG

SEQ ID NO: 100329 - protein, 617 aa, Homo sapiens
MKCALFLRVKILQRVCRSRYIVHAGTCDSTAAMSGILKRKFEEVDGSSPCSSVRESDDEVSSSESADSGDSVNPSTSSHFTPSSILKREKRLRTKNVHFSCVTVYYFTRRQGFTSVPSQGGSTLGMSSRHNSVRQYTLGEFAREQERLHREMLREHLREEKLNSLKLKMTKNGTVESEEASTLTLDDISDDDIDLDNTEVDEYFFLQPLPTKKRRALLRASGVKKIDVEEKHELRAIRLSREDCGCDCRVFCDPDTCTCSLAGIKCQVDRMSFPCGCTKEGCSNTAGRIEFNPIRVRTHFLHTIMKLELEKNREQQIPTLNGCHSEISAHSSSMGPVAHSVEYSIADSFEIETEPQAAVLHLQSAEELDCQGEEEEEEEDGSSFCSGVTDSSTQSLAPSESDEEEEEEEEEEEEEDDDDDKGDGFVEGLGTHAEVVPLPSVLCYSDGTAVHESHAKNASFYANSSTLYYQIDSHIPGTPNQISENYSERDTVKNGTLSLVPYTMTPEQFVDYARQAEEAYGASHYPAANPSVIVCCSSSENDSGVPCNSLYPEHRSNHPQVEFHSYLKGPSQEGFVSALNGDSHISEHPAENSLSLAEKSILHEECIKSPVVETVPV

SEQ ID NO: 100330 - protein, 174 aa, Homo sapiens
MSFRKVNIIILVLAVALFLLVLHHNFLSLSSLLRNEVTDSGIVGPQPIDFVPNALRHAVDGRQEEIPVVIAASEDRLGGAIAAINSIQHNTRSNVIFYIVTLNNTADHLRSWLNSDSLKSIRYKIVNFDPKLLEGKVKEDPDQGESMKPLTFARFYLPILVPSAKKAIYMDDDV

SEQ ID NO: 100331 - protein, 108 aa, Homo sapiens
MEETIKDPPTSAVLLDHCHFSQVIFNSVEKFYIPGGDVTCHYTFTQHFIPRRKDWIGIFRRQSFVLLPRLECNGAISAHRNLRLPGSSDSPASASRVAGITGGVEDNP

SEQ ID NO: 100332 - protein, 432 aa, Homo sapiens
MAETVWSTDTGEAVYRSRDPVRNLRLRVHLQRITSSNFLHYQPAAELGKDLIDLATFRPQPTASGHRPEEDEEEEIVIGWQEKLFSQFEVDLYQNETACQSPLDYQYRQEILKLENSGGKKNRRIFTYTDSDRYTNLEEHCQRMTTAASEVPSFLVERMANVRRRRQDRRGMEGGILKSRIVTWEPSEEFVRNNHVINTPLQTMHIMADLGPYKKLGYKKYEHVLCTLKVDSNGVITVKPDFTGLKGPYRIETEGEKQELWKYTIDNVSPHAQPEEEERERRVFKDLYGRHKEYLSSLVGTDFEMTVPGALRLFVNGEVVSAQGYEYDNLYVHFFVELPTAHWSSPAFQQLSGVTQTCTTKSLAMDKVAHFSYPFTFEAFFLHEDESSDALPEWPVLYCEVLSLDFWQRYRVEGYGAVVLPATPATMTWPWH

SEQ ID NO: 100333 - protein, 27 aa, Homo sapiens
  MOD_RES (1)..(1): Any amino acid
XDQVIRQRSLSSLELFLSCAQKQRSLA

SEQ ID NO: 100334 - protein, 84 aa, Homo sapiens
MISSKPRLVVPYGLKTLLEGISRAVLKTNPSNINQFAAAYFQELTMYRGNTTMDIKDLVKQFHQIKVEKWSEGTTPQKKLECLK

SEQ ID NO: 100335 - protein, 83 aa, Homo sapiens
MEKVASAVLFPCKYATTGCSLTLHHTEKPEHEDICEYRPYSCPCPGASCKWQGSLEAVMSHLMHAHKSITTLQGEDIVFLATD

SEQ ID NO: 100336 - protein, 86 aa, Homo sapiens
MASEVLEARQDSYISLVPYASGMPIKKIGHRSVDSSGETTYKKTTSSALKGAIQLGITHTVGSLSTKPERDVLMQDFYVVESIFFP

SEQ ID NO: 100337 - protein, 88 aa, Homo sapiens
  MOD_RES (1)..(1): Any amino acid
XREMEEQMRRQREESYSRMGYMDPRERDMRMGGGGAMNMGDPYGSGGQKFPPLGGGGGIGYEANPGVPPATMSGSMMGSDMVRMIDVG

SEQ ID NO: 100338 - protein, 131 aa, Homo sapiens
MEQSNDSLRVNHNDGEESKTSAQVFEHLICMDSRDSSFGQNDSPTVLPITTREANNSLISQNIPGPLTQTQTLSAEQFHLVDQNGQAIQYELQSLGESNAQMMIVASPTENGQVLRVIPPTQTGMAQVIIP

SEQ ID NO: 100339 - protein, 134 aa, Homo sapiens
  MOD_RES (1)..(1): Any amino acid
XPREREERRARVAEAGAAGTRSAGLLRAGASSRSTAPGVTCWSLPAREENVAALRDAPDPGLGAVAGSPGLQRGWGRFLHAGPESGAADPRVFLLRGPPGPVPSPGADFSPLPGRHPGRPAFFWKPCQKAAACP

SEQ ID NO: 100340 - protein, 149 aa, Homo sapiens
MPTGDFDSKPSWADQVEEEGEDDKCVTSELLKGIPLATGDTSPEPELLPGAPLPPPKEVINGNIKTVTEYKIDEDGKKFKIVRTFRIETRKASKAVARRKSVALSPRLKCSGTISTHCNLRLLGSSDSPASASRVAGVTELEEVRELRV

SEQ ID NO: 100341 - protein, 975 aa, Homo sapiens
  MOD_RES (1)..(1): Any amino acid
XIAIKQKLIDELENSQKRLQTLKKQYEEKLMMLQHKIRDTQLERDQVLQNLGSVESYSEEKAKKVRSEYEKKLQAMNKELQRLQAAQKEHARLLKNQSQYEKQLKKLQQDVMEMKKTKVRLMKQMKEEQEKARLTESRRNREIAQLKKDQRKRDHQLRLLEAQKRNQEVVLRRKTEEVTALRRQVRPMSDKVAGKVTRKLSSSDAPAQDTGSSAAAVETDASRTGAQQKMRIPVARVQALPTPATNGNRKKYQRKGLTGRVFISKTARMKWQLLERRVTDIIMQKMTISNMEADMNRLLKQREELTKRREKLSKRREKIVKENGEGDKNVANINEEMESLTANIDYINDSISDCQANIMQMEEAKEEGETLDVTAVINACTLTEARYLLDHFLSMGINKGLQAAQKEAQIKVLEGRLKQTEITSATQNQLLFHMLKEKAELNPELDALLGHALQDLDSVPLENVEDSTDEDAPLNSPGSEGSTLSSDLMKLCGEVKPKNKARRRTTTQMELLYADSSELASDTSTGDASLPGPLTPVAEGQEIGMNTETSGTSAREKELSPPPGLPSKIGSISRQSSLSEKKIPEPSPVTRRKAYEKAEKSKAKEQKQSDESDSSLSEVHRGIINPFPASKGIRAFPLQCIHIAEGHTKAVLCVDSTDDLLFTGSKDRTCKVWNLVTGQEIMSLGGHPNNVVSVKYCNYTSLVFTVSTSYIKVWDIRDSAKCIRTLTSSGQVTLGDACSASTSRTVAIPSGENQINQIALNPTGTFLYAASGNAVRMWDLKRFQSTGKLTGHLGPVMCLTVDQISSGQDLIITGSKDHYIKMFDVTEGALGTVSPTHNFEPPHYDGIEALTIQGDNLFSGSRDNGIKKWDLTQKDLLQQVPNAHKDWVCALGVVPDHPVLLSGCRGGILKVWNMDTFMPVGEMKGHDSPINAICVNSTHIFTAADDRTVRIWKARNLQDGQISDTGDLGEDIASN

SEQ ID NO: 100342 - protein, 131 aa, Homo sapiens
MRSLPSNGELDPDVLESMASLGCFRDRERLHRELRSEEENQEKMIYYLLLDRKERYPSCEDQDLPPRNDVDPPRKRVDSPMLSRHGKRRPERKSMEVLSITDAGGGGSPVPTRRALEMAQHSQRSRSVSGA

SEQ ID NO: 100343 - protein, 192 aa, Homo sapiens
MPITRMRMRPWLEMQINSNQIPGLIWINKEEMIFQIPWKHAAKHGWDINKDACLFRSWAIHTGRYKAGEKEPDPKTWKANFRCAMNSLPDIEEVKDQSRNKGSSAVRVYRMLPPLTKNQRKERKSKSSRDAKSKAKRKSCGDSSPDTFSDGLSSSTLPDDHSSYTVPGYMQDLEVEQALTPALSPCAVSSTL

SEQ ID NO: 100344 - protein, 194 aa, Homo sapiens
KDGKYELLTSANEVIVEEIKDLMTKSDIKGQHTETLLAGSLAKALCYIHRMNKEVKDNQEMKSRILVIKAAEDSALQYMNFMNVIFAAQKQACDITGGLYLKVPQMPSLLQYLLWVFLPDQDQRSQLILPPPVHVDYRAACFCHRNLIEIGYVCSVCLSIFCNFSPICTTCETAFKISLPPVLKAKKKKLKVSA

SEQ ID NO: 100345 - protein, 416 aa, Homo sapiens
MASKEMFEDTVEERVINEEYKIWKKNTPFLYDLVMTHALQWPSLTVQWLPEVTKPEGKDYALHWLVLGTHTSDEQNHLVVARVHIPNDDAQFDASHCDSDKGGKIECEIKINHEGEVNRARYMPQNPHIIATKTPSSDVLVFDYTKHPAKPDPSGECNPDLRLRGHQKEGYGLSWNSNLSGHLLSASDDHTVCLWDINAGPKEGKIVDAKAIFTGHSAVVEDVAWHLLHESLFGSVADDQKLMIWDTRSNTTSKPSHLVDAHTAEVNCLSFNPYSEFILATGSADKTVALWDLRNLKLKLHTFESHKDEIFQVHWSPHNETILASSGTDRRLNVWDLSKIGEEQSAEDAEDGPPELLFIHGGHTAKISDFSWNPNEPWVICSVSEDNIMQIWQMAENIYNDEESDVTTSELEGQGS

SEQ ID NO: 100346 - protein, 176 aa, Homo sapiens
MATEGGGKEMNEIKTQFTTREGLYKLLPHSEYSRPNRVPFNSQGSNPVRVSFVNLNDQSGNGDRLCFNVGRELYFYIYKGVRKAADLSKPIDKRIYKGTQPTCHDFNHLTATAESVSLLVGFSAGQVQLIDPIKKETSKLFNEERRDFTMLARLVWNSWLQVIHPPQLPKVLELQA

SEQ ID NO: 100347 - protein, 107 aa, Homo sapiens
MVKLLVAKILCMVGVFFFMLLGSLLPVKIIETDFEKAHRSKKILSLCNTFGGGVFLATCFNALLPAVREKLQKVLSLGHISTDYPLAETILLLGFFMTVFLEQLILT

SEQ ID NO: 100348 - protein, 94 aa, Homo sapiens
  MOD_RES (1)..(1): Any amino acid
XNFTELSCYNYGSGSVKNCCPLNWEYFQSSCYFFSTDTISWALSLKNCSAMGAHLVVINSQEEQLLGCRGAQQHSYPGGLCHHERLFKPKAKLE

SEQ ID NO: 100349 - protein, 181 aa, Homo sapiens
MVRVRAVVMARDDSSGGWLPVGGGGLSQVSVCRVRGARPEGGARQGHYVIHGERLRDQKTTLECTLKPGLVYNKVNPIFHHWSLGDCKFGLTFQSPAEADEFQKSLLAALAALGRGSLTPSSSSSSSSPSQDTAETPCPLTSHVDSDSSSSHSRQETPPSAAAAPIITMESASGFGPTTPP

SEQ ID NO: 100350 - protein, 810 aa, Homo sapiens
MMKDCKHPNIVAYFGSYLRRDKLWICMEFCGGGSLQDIYHVTGPLSELQIAYVSRETLQGLYYLHSKGKMHRDIKGANILLTDNGHVKLADFGVSAQITATIAKRKSFIGTPYWMAPEVAAVERKGGYNQLCDLWAVGITAIELAELQPPMFDLHPMRALFLMTKSNFQPPKLKDKMKWSNSFHHFVKMALTKNPKKRPTAEKLLQHPFVTQHLTRSLAIELLDKVNNPDHSTYHDFDDDDPEPLVAVPHRIHSTSRNVREEKTRSEITFGQVKFDPPLRKETEPHHELDLQLEYGQGHQGGYFLGANKSLLKSVEEELHQRGHVAHLEDDEGDDDESKHSTLKAKIPPPLPPKPKSIFIPQEMHSTEDENQGTIKRCPMSGSPAKPSQVPPRPPPPRLPPHKPVALGNGMSSFQLNGERDGSLCQQQNEHRGTNLSRKEKKDVPKPISNGLPPTPKVHMGACFSKVFNGCPLKIHCASSWINPDTRDQYLIFGAEEGIYTLNLNELHETSMEQLFPRRCTWLYVMNNCLLSISGKASQLYSHNLPGLFDYARQMQKLPVAIPAHKLPDRILPRKFSVSAKIPETKWCQKCCVVRNPYTGHKYLCGALQTSIVLLEWVEPMQKFMLIKHIDFPIPCPLRMFEMLVVPEQEYPLVCVGVSRGRDFNQVVRFETVNPNSTSSWFTESDTPQTNVTHVTQLERDTILVCLDCCIKIVNLQGRLKSSRKLSSELTFDFQIESIVCLQDSVLAFWKHGMQGRSFRSNEVTQEISDSTRIFRLLGSDRVVVLESRPTDNPTANSNLYILAGHENSY

SEQ ID NO: 100351 - protein, 165 aa, Homo sapiens
MRLRTRKASQQSNQIQTQRTARAKRKYSEVDDSLPSGGEKPSKNETGLLSSIKKFIKGSTPKEERENPSKRSRIERDIDNNLITSTPRAGEKPNKQISRVRRKSQVNGEAGSYEMTNQHVKQNGKLEDNPSSGSPPRTTLLGTIFSPVFNFFSPANKNGTSGSDS

SEQ ID NO: 100352 - protein, 94 aa, Homo sapiens
MSSKMVISEPGLNWDISPKNGLKTFFSRENYKDHSMAPSLKELRVLSNRRIGENLNASASSVENEPAVSSATQAKEKVKTTIGMVLLPKPRVPY

SEQ ID NO: 100353 - protein, 315 aa, Homo sapiens
MHRLAPHCSFARWLLCNGSLFRYKHPSEEELRALAGKPRPRGRKERWANGLSEEKPLSVPRDAPFQLETCPLTTVDALVLRFFLEYQWFVDFAVYSGGVYLFTEAYYYMLGPAKETNIAVFWCLLTVTFSIKMFLTVTRLYFSAEEGGERSVCLTFAFLFLLLAMLVQVVREETLELGLEPGLASMTQNLEPLLKKQGWDWALPVAKLAIRVGLAVVGSVLGAFLTFPGLRLAQTHRDALTMSEDRPMLQFLLHTSFLSPLFILWLWTKPIARDFLHQPPFGETRFSLLSDSAFDSGRLWLLVVLCLLRLAVTRP

SEQ ID NO: 100354 - protein, 37 aa, Homo sapiens
MNCEARGLESHIKSYLSSWFEDVVCPIQRVVLLFQEK

SEQ ID NO: 100355 - protein, 135 aa, Homo sapiens
MLQINQVKVGNEVATGTGPNKKIAKKNAAEAMLLQLGYKASTNLQDQLEKTGENKGWSGPKPGFPEPTNNTPKGILHLSPDVYQEMEASRHKVISGTTLGYLSPKDMNQPSSSFFSISPTSNSSATIARELLMNG

SEQ ID NO: 100356 - protein, 95 aa, Homo sapiens
  MOD_RES (1)..(1): Any amino acid
XANAYFLCLLILQLIPEISSLTWFTTIVPLVLVITMTAVKDATDDYFRHKSDNQVNNRQSEVLINSKLQNEKWMNVKVGDIIKLENNQFVALIKD

SEQ ID NO: 100357 - protein, 72 aa, Homo sapiens
MSIRSFLESIFRCKQYSGLLLEIQRLRTRNYCMQQETLISSTYAKLGVQLRNMAQETNHSQVPMLCSTGCGF

SEQ ID NO: 100358 - protein, 343 aa, Homo sapiens
MNFQAGGGQSPQQQQSLAAPGGGGAAAQQLVCGGQFGGAGPGAGGGGGPSQQLAGGPPQQFALSNSAAIRAEIQRFESVHPNIYAIYDLIERIEDLALQNQIREHVISIEDSFVNSQEWTLSRSVPELKVGIVGNLSSGKSALVHRYLTGTYVQEESPEGGRFKKEIVVDGQSYLLLIRDEGGPPELQFAAWVDAVVFVFSLEDEISFQTVYNYFLRLCSFRNASEVPMVLVGTQDAISAANPRVIDDSRARKLSTDLKRCTYYETCATYGLNVERVFQDVAQKVVALRKKQQLAIGPCKSLPNSPSHSAVSAASIPAVHINQICATVSNFSSTKRPFQLLPN

SEQ ID NO: 100359 - protein, 182 aa, Homo sapiens
MENGCLLNYLRENKGKLRKEMLLSVCQDICEGMEYLERNGYIHRDLAARNCLVSSTCIVKISDFGMTRYVLDDEYVSSFGAKFPIKWSPPEVFLFNKYSSKSDVWSFGVLMWEVFTEGKMPFENKSNLQVVEAISEGFRLYRPHLAPMSIYEVMYSCWHEKPEGRPTFAELLRAVTEIAETW

SEQ ID NO: 100360 - protein, 94 aa, Homo sapiens
  MOD_RES (1)..(1): Any amino acid
XQKITGLKSISIHSEKSQIERKNILKGLLEGDYEVVVSTGVLGRGLDLISVRLVVNFDMPSSMDEYVHQSTHHNQYEVYSINRGMVQEVTCHPR

SEQ ID NO: 100361 - protein, 771 aa, Homo sapiens
MGVGRKGGAGETESHPRIGLELASWLPHPQQEAESNLRKAKQGYVQRCEDHDKARFLVAKAEEEQAGSAPGAGSTATKTLDKRRRLEEEAKNKAEEAMATYRTCVADAKTQKQELEDTKVTALRQIQEVIRQSDQTIKSATISYYQMMHMQTAPLPVHFQMLCESSKLYDPGQQYASHVRQLQRDQEPDVHYDFEPHVSANAWSPVMRARKSSFNVSDVARPEAAGSPPEEGGCTEGTPAKDHRAGRGHQVHKSWPLSISDSDSGLDPGPGAGDFKKFERTSSSGTMSSTEELVDPDGGAGASAFEQADLNGMTPELPVAVPSGPFRHEGLSKAARTHRLRKLRTPAKCRECNSYVYFQGAECEECCLACHKKCLETLAIQCGHKKLQGRLQLFGQDFSHAARSAPDGVPFIVKKCVCEIERRALRTKGIYRVNGVKTRVEKLCQAFENGKELVELSQASPHDISNVLKLYLRQLPEPLISFRLYHELVGLAKDSLKAEAEAKAASRGRQDGSESEAVAVALAGRLRELLRDLPPENRASLQYLLRHLRRIVEVEQDNKMTPGNLGIVFGPTLLRPRPTEATVSLSSLVDYPHQARVIETLIVHYGLVFEEEPEETPGGQDESSNQRAEVVVQVPYLEAGEAVVYPLQEAAADGCRESRVVSNDSDSDLEEASELLSSSEASALGHLSFLEQQQSEASLEVASGSHSGSEEQLEATAREDGDGDEDGPAQQLSGFNTNQSNNVLQAPLPPMRLRGGRMTLGSCRERQPEFV

SEQ ID NO: 100362 - protein, 98 aa, Homo sapiens
MQGAGILDASTAAQSGVGLARAHFEKQPPSNLRKSNFFHFVLAMYDRQGQPVEVERTAFIDFVEKDREPGAEKTNNGIHYRLRLVYNNGLRTEQDLYV

SEQ ID NO: 100363 - protein, 72 aa, Homo sapiens
  MOD_RES (1)..(1): Any amino acid
XFDVWSNDVNLANLMEQLGVAGKVHISEATAKYLDDRYEMEDGKVIERLGQSVVADQLKDLPFVRNHICSQI

SEQ ID NO: 100364 - protein, 54 aa, Homo sapiens
  MOD_RES (1)..(1): Any amino acid
XLCLLKWISERGSWTCELCCYRYHVIAIKMKQPCQVSLFMKELQFTECLSAGEL

SEQ ID NO: 100365 - protein, 238 aa, Homo sapiens
MSRVPSPPPPAEMSSGPVAESWCYTQIKVVKFSYMWTINNFSFCREEMGEVIKSSTFSSGANDKLKWCLRVNPKGLDEESKDYLSLYLLLVSCPKSEVRAKFKFSILNAKGEETKAMESQRAYRFVQGKDWGFKKFIRRDFLLDEANGLLPDDKLTLFCEVSVVQDSVNISGQNTMNMVKVPECRLADELGGLWENSRFTDCCLCVAGQEFQAHKAILAARSPVFSAMFEHEMEESKK

SEQ ID NO: 100366 - protein, 157 aa, Homo sapiens
MTNEAGAPRLMITHIVNQNFKSYAGEKILGPFHKRFSCIIGPNGSGKSNVIDSMLFVFGYRAQKIRSKKLSVLIHNSDEHKDIQSCTVEVHFQKIIDKEGDDYEVIPNSNFYVSRTACRDNTSVYHISGKKKTFKDVGNLLRSHGIDLDHNRFLILQ

SEQ ID NO: 100367 - protein, 161 aa, Homo sapiens
  MOD_RES (1)..(1): Any amino acid
XFTNWSQDRQEPGKFTPENIDPFLCSHLIYSFASIENNKVIIKDKSEVMLYQTINSLKTKNPKLKILLSIGGYLFGSKGDLDFINLLSFDFHGSWEKPLITGHNSPLSKGWQDRGPSSYYNVEYAVGYWIHKGMPSEKVVMGIPTYGHSFTLASAETTVGA

SEQ ID NO: 100368 - protein, 65 aa, Homo sapiens
MAHEHGHEHGHHKMELPDYRQWKIEGTPLETIQKKLAAKGLRDPWGRNEAWRYMGGFAKSVSFSD

SEQ ID NO: 100369 - protein, 140 aa, Homo sapiens
METRKKDGTWPSAQLHVMNNNMSEEDEDFKGQPGICGLTNLGNTCFMNSALQCLSNVPQLTEYFLNNCYLEELNFRNPLGMKGEIAEAYADLVKQAWSGHHRSIVPHVFKNKVGHFASQFLGYQQHDSQELLSFLLDGLH

SEQ ID NO: 100370 - protein, 158 aa, Homo sapiens
MPSIKLQSSDGEIFEVDVEIAKQSVTIKTMLEDLGMDDEGDDDPVPLPNVNAAILKKVIQWCTHHKDDPPPPEDDENKEKRTDDIPVWDQEFLKVDQGTLFELILAANYLDIKGLLDVTCKTVANMIKGKTPEEIRKTFNIKNDFTEEEEAQQGRIKT

SEQ ID NO: 100371 - protein, 338 aa, Homo sapiens
MAALRDAEIQKDVQTYYGQVLKRSADLQTNGCVTTARPVPKHIREALQNVHEEVALRYYGCGLVIPEHLENCWILDLGSGSGRDCYVLSQLVGEKGHVTGIDMTKGQVEVAEKYLDYHMEKYGFQASNVTFIHGYIEKLGEAGIKNESHDIVVSNCVINLVPDKQQVLQEAYRVLKHGGELYFSDVYTSLELPEEIRTHKVLWGECLGGALYWKELAVLAQKIGFCPPRLVTANLITIQNKELERVIGDCRFVSATFRLFKHSKTGPTKRCQVIYNGGITGHEKELMFDANFTFKEGEIVEVDEETAAILKNSRFAQDFLIRPIGEKLPTSGAVLLWS

SEQ ID NO: 100372 - protein, 82 aa, Homo sapiens
ILLTVLTCYFWKKNQKLEYKYSKLVMNATLKDCDLPAADSCAIMEGEDVEDDLIFTSKKSLFGKIKSFTSKVSGSSPLGAES

SEQ ID NO: 100373 - protein, 127 aa, Homo sapiens
MRWGHHLPRASWGSGFRRALQRPDDRIPFLIHWSWPLQGERPFGPPRAFIRHHGSSVDSAPPPGRHGRLFPSASATEAIQRHRRNLAEWFSRLPREERQFGPTFALDTVHVDPVIRESTPDELLRPP

SEQ ID NO: 100374 - protein, 195 aa, Homo sapiens
MTLFQNTRRPLRNRSRKLRDCHSVTQAGVQWRDLSSLKPPPPVFKRFSCLSLPSSWDYRFVSEMLQKNYSRVKPIVTPRFSLSCSETLMGELGNIAKTRDLHIQSHISENRDEVEAVKNLYPSYKNYTSVYDKNNLLTNKTVMAHGCYLSAEELNVFHERGASIAHCPNSNLSLSSGFLNVLEVLKHEVKIGLGT

SEQ ID NO: 100375 - protein, 1498 aa, Homo sapiens [sequence omitted]

SEQ ID NO: 100376 - protein, 102 aa, Homo sapiens
MAASKKAVLGPLVGAVDQGTSSTRFLVFNSKTAELLSHHQVEIKQEFPREGWVEQDPKEILHSVYECIEKTCEKLGQLNIDISNIKDNPTSCFMEKVEGLRP

SEQ ID NO: 100377 - protein, 376 aa, Homo sapiens
MAALSGVRWLTRALVSAGNPGAWRGLSTSAAAHAASRSQAEDVRVEGSFPVTMLPGDGVGPELMHAVKEVFKAAAVPVEFQEHHLSEVQNMASEEKLEQVLSSMKENKVAIIGKIHTPMEYKGELASYDMRLRRKLDLFANVVHVKSLPGYMTRHNNLDLVIIREQTEGEYSSLEHESARGVIECLKIVTRAKSQRIAKFAFDYATKKGRGKVTAVHKANIMKLGDGLFLQCCEEVAELYPKIKFETMIIDNCCMQLVQNPYQFDVLVMPNLYGNIIDNLAAGLVGGAGVVPGESYSAEYAVFETGARHPFAQAVGRNIANPTAMLLSASNMLRHLNLEYHSSMIADAVKKVIKVGKIPSAVPSFLLHPLPFSWAI

SEQ ID NO: 100378 - protein, 156 aa, Homo sapiens
MLLLLLLAPLFLRPPGAGGAQTPNATSEGCQIIHPPWEGGIRYRGLTRDQVKAINFLPVDYEIEYVCRGEREVVGPKVRKCLANGSWTDMDTPSRCVRICSKSYLTLENGKVFLTGGDLPALDGARVDFRCDPDFHLVGSSRSICSQGQWSTPKPH

SEQ ID NO: 100379 - protein, 122 aa, Homo sapiens
MIALMDTDGSGKLNLQEFHHLWNKIKAWQKIFKHYDTDQSGTINSYEMRNAVNDAGFHLNNQLYDIITMRYADKHMNIDFDSFICCFVRLEGMFRAFHAFDKDGDGIIKLNVLEWLQLTMYA

SEQ ID NO: 100380 - protein, 53 aa, Homo sapiens
MNWHMIISGLIVVVLKVVGMTLFLLYFPQIFNKSNDGFTTTRSYGTEVSSGHN

SEQ ID NO: 100381 - protein, 84 aa, Homo sapiens
MALASVLERPLPVNQRGFFGLGGRADLLDLGPGSLSDGLSLAAPGWGVPEEPGIEMLHGTTTLAFKASTTWTVKGTGFQGPPSL

SEQ ID NO: 100382 - protein, 141 aa, Homo sapiens
MRLSVRRVLLAAGCALVLVLAVQLGQQVLECRAVLAGLRSPRGAMRPEQEELVMVGTNHVEYRYGKAMPLIFVGGVPRSGTTLMRAMLDAHPEVRCGEETRIIPRVLAMRQAWSKSGREKLRLDEAGVTDEVLDAAMQAFI

SEQ ID NO: 100383 - protein, 3447 aa, Homo sapiens
MSGEDAEVRAVSEDVSNGSSGSPSPGDTLPWNLGKTQRSRRSGGGAGSNGSVLDPAERAVIRIADERDRVQKKTFTKWVNKHLIKAQRHISDLYEDLRDGHNLISLLEVLSGDSLPREKGRMRFHKLQNVQIALDYLRHRQVKLVNIRNDDIADGNPKLTLGLIWTIILHFQISDIQVSGQSEDMTAKEKLLLWSQRMVEGYQGLRCDNFTSSWRDGRLFNAIIHRHKPLLIDMNKVYRQTNLENLDQAFSVAERDLGVTRLLDPEDVDVPQPDEKSIITYVSSLYDAMPRVPDVQDGVRANELQLRWQEYRELVLLLLQWMRHHTAAFEERRFPSSFEEIEILWSQFLKFKEMELPAKEADKNRSKGIYQSLEGAVQAGQLKVPPGYHPLDVEKEWGKLHVAILEREKQLRSEFERLECLQRIVTKLQMEAGLCEEQLNQADALLQSDVRLLAAGKVPQRAGEVERDLDKADSMIRLLFNDVQTLKDGRHPQGEQMYRRVYRLHERLVAIRTEYNLRLKAGVAAPATQVAQVTLQSVQRRPELEDSTLRYLQDLLAWVEENQHRVDGAEWGVDLPSVEAQLGSHRGLHQSIEEFRAKIERARSDEGQLSPATRGAYRDCLGRLDLQYAKLLNSSKARLRSLESLHSFVAAATKELMWLNEKEEEEVGFDWSDRNTNMTAKKESYSALMRELELKEKKIKELQNAGDRLLREDHPARPTVESFQAALQTQWSWMLQLCCCIEAHLKENAAYFQFFSDVREAEGQLQKLQEALRRKYSCDRSATVTRLEDLLQDAQDEKEQLNEYKGHLSGLAKRAKAVVQLKPRHPAHPMRGRLPLLAVCDYKQVEVTVHKGDECQLVGPAQPSHWKVLSSSGSEAAVPSVCFLVPPPNQEAQEAVTRLEAQHQALVTLWHQLHVDMKSLLAWQSLRRDVQLIRSWSLATFRTLKPEEQRQALHSLELHYQAFLRDSQDAGGFGPEDRLMAEREYGSCSHHYQQLLQSLEQGAQEESRCQRCISELKDIRLQLEACETRTVHRLRLPLDKEPARECAQRIAEQQKAQAEVEGLGKGVARLSAEAEKVLALPEPSPAAPTLRSELELTLGKLEQVRSLSAIYLEKLKTISLVIRGTQGAEEVLRAHEEQLKEAQAVPATLPELEATKASLKKLRAQAEAQQPTFDALRDELRGAQEVGERLQQRHGERDVEVERWRERVAQLLERWQAVLAQTDVRQRELEQLGRQLRYYRESADPLGAWLQDARRRQEQIQAMPLADSQAVREQLRQEQALLEEIERHGEKVEECQRFAKQYINAIKDYELQLVTYKAQLEPVASPAKKPKVQSGSESVIQEYVDLRTHYSELTTLTSQYIKFISETLRRMEEEEMQTVQQEQLLQETQALQQSFLSEKDSLLQRERFIEQEKAKLEQLFQDEVAKAQQLREEQQRQQQQMEQERQRLVASMEEARRRQHEAEEGVRRKQEELQQLEQQRRQQEELLAEENQRLREQLQLLEEQHRAALAHSEEVTASQVAATKTLPNGRDALDGPAAEAEPEHSFDGLRRKVSAQRLQEAGILSAEELQRLAQGHTTVDELARREDVRHYLQGRSSIAGLLLKATNEKLSVYAALQRQLLSPGTALILLEAQAASGFLLDPVRNRRLTVNEAVKEGVVGPELHHKLLSAERAVTGYKDPYTGQQISLFQAMQKGLIVREHGIRLLEAQIATGGVIDPVHSHRVPVDVAYRRGYFDEEMNRVLADPSDDTKGFFDPNTHENLTYLQLLERCVEDPETGLCLLPLTDKAAKGGELVYTDSEARDVFEKATVSAPFGKFQGKTVTIWEIINSEYFTAEQRRDLLRQFRTGRITVEKIIKIIITVVEEQEQKGRLCFEGLRSLVPAAELLESRVIDRELYQQLQRGERSVRDVAEVDTVRRALRGANVIAGVWLEEAGQKLSIYNALKKDLLPSDMAVALLEAQAGTGHIIDPATSARLTVDEAVRAGLVGPEFHEKLLSAEKAVTGYRDPYTGQSVSLFQALKKGLIPREQGLRLLDAQLSTGGIVDPSKSHRVPLDVACARGCLDEETSRALSAPRADAKAYSDPSTGEPATYGELQQRCRPDQLTGLSLLPLSEKAARARQEELYSELQARETFEKTPVEVPVGGFKGRTVTVWELISSEYFTAEQRQELLRQFRTGKVTVEKVIKILITIVEEVETLRQERLSFSGLRAPVPASELLASGVLSRAQFEQLKDGKTTVKDLSELGSVRTLLQGSGCLAGIYLEDTKEKVSIYEAMRRGLLRATTAALLLEAQAATGFLVDPVRNQRLYVHEAVKAGVVGPELHEQLLSAEKAVTGYRDPYSGSTISLFQAMQKGLVLRQHGIRLLEAQIATGGIIDPVHSHRVPVDVAYQRGYFSEEMNRVLADPSDDTKGFFDPNTHENLTYRQLLERCVEDPETGLRLLPLKGAEKAEVVETTQVYTEEETRRAFEETQIDIPGGGSHGGSTMSLWEVMQSDLIPEEQRAQLMADFQAGRVTKERMIIIIIEIIEKTEIIRQQGLASYDYVRRRLTAEDLFEARIISLETYNLLREGTRSLREALEAESAWCYLYGTGSVAGVYLPGSRQTLSIYQALKKGLLSAEVARLLLEAQAATGFLLDPVKGERLTVDEAVRKGLVGPELHDRLLSAERAVTGYRDPYTEQTISLFQAMKKELIPTEEALRLLDAQLATGGIVDPRLGFHLPLEVAYQRGYLNKDTHDQLSEPSEVRSYVDPSTDERLSYTQLLRRCRRDDGTGQLLLPLSDARKLTFRGLRKQITMEELVRSQVMDEATALQLREGLTSIEEVTKNLQKFLEGTSCIAGVFVDATKERLSVYQAMKKGIIRPGTAFELLEAQAATGYVIDPIKGLKLTVEEAVRMGIVGPEFKDKLLSAERAVTGYKDPYSGKLISLFQAMKKGLILKDHGIRLLEAQIATGGIIDPEESHRLPVEVAYKRGLFDEEMNEILTDPSDDTKGFFDPNTEENLTYLQLMERCITDPQTGLCLLPLKEKKRERKTSSKSSVRKRRVVIVDPETGKEMSVYEAYRKGLIDHQTYLELSEQECEWEEITISSSDGVVKSMIIDRRSGRQYDIDDAIAKNLIDRSALDQYRAGTLSITEFADMLSGNAGGFRSRSSSVGSSSSYPISPAVSRTQLASWSDPTEETGPVAGILDTETLEKVSITEAMHRNLVDNITGQRLLEAQACTGGIIDPSTGERFPVTDAVNKGLVDKIMVDRINLAQKAFCGFEDPRTKTKMSAAQALKKGWLYYEAGQRFLEVQYLTGGLIEPDTPGRVPLDEALQRGTVDARTAQKLRDVGAYSKYLTCPKTKLKISYKDALDRSMVEEGTGLRLLEAAAQSTKGYYSPYSVSGSGSTAGSRTGSRTGSRAGSRRGSFDATGSGFSMTFSSSSYSSSGYGRRYASGSSASLGGPESAVA

SEQ ID NO: 100384 - protein, 196 aa, Homo sapiens
  MOD_RES (1)..(1): Any amino acid
XRTSSQYMRFLTLGRNVRRRNMSTQELTQLNFTVAIDFTASNGNPLQPTSLHYMSPYQLSAYAMALKAVGEIIQDYDSDKLFPAYGFGAKLPPEGRISHQFPLNNNDEDPNCAGIEGVLESYFQSLRTVQLYGPTYFAPVINQVARAAAKISDGSQYYVLLIITDGVISDMTQTKEAIVSASSLPMSIIIVGVGPA

SEQ ID NO: 100385 - protein, 789 aa, Homo sapiens
MSSGQDGGPRSPGRDPELQVEAAEVTTKEYDFGLGAPVSEAENYQNTLQLEQEVRNQDRFISTLKLQIEDLKQTNHGLEEYVRKLLDSKEVVSSQVDDLTSHNEHLCKELIKIDQLAEQLEKEKNFVVDSANKELEEAKIDLICQQNNIIVLEDTIKRLKSIILDTEKAQNKSPSRLDSFVKTLEADKDHYKSEAQHLRKMMRSRSKSPRRPSPTARGANCDVELLKTTTRDREELKCMLEKYERHLAEIQGNVKVLKSERDKIFLLYEQAQEEITRLRREMMKSCKSPKSTTAHAILRRVETERDVAFTDLRRMTTERDSLRERLKIAQETAFNEKAHLEQRIEELECTVHNLDDERMEQMSNMTLMKETISTVEKEMKSLARKAMDTESELGRQKAENNSLRQCTEALIVCEQDVSRMRRQLDETNDELAQIARERDILAHDNDNLQEQFAKAKQENQALSKKLNDTHNELNDIKQKVQDTNLEVNKLKNILKSEESENRQMMEQLRKANEDAENWENKARQSEADNNTLKLELITAEAEGNRLKEKVDSLNREVEQHLNAERSYKSQISTLHKSVVKMEEELQKVQFEKVSALADLSSTRELCIKLDSSKELLNRQLVAKDQEIEMRENELDSAHSEIELLRSQMANERISMQNLEALLVANRDKEYQSQIALQEKESEIQLLKEHLCLAENKMAIQSRDVAQFRNVVTQLEADLDITKRQLGTERFERERAVQELRRQNYSSNAYHMSSTMKPNTKCHSPERAHHRSPDRGLDRSLEENLCYRDF

SEQ ID NO: 100386 - protein, 494 aa, Homo sapiens
MEDQAGQRDYDLLVVGGGSGGLACAKEAAQLGRKVAVVDYVEPSPQGTRWGLGGTCVNVGCIPKKLMHQAALLGGLIQDAPNYGWEVAQPVPHDWRKMAEAVQNHVKSLNWGHRVQLQDRKVKYFNIKASFVDEHTVCGVAKGGKEILLSADHIIIATGGRPRYPTHIEGALEYGITSDDIFWLKESPGKTLVVGASYVALECAGFLTGIGLDTTIMMRSIPLRGFDQQMSSMVIEHMASHGTRFLRGCAPSRVRRLPDGQLQVTWEDSTTGKEDTGTFDTVLWAIGRVPDTRSLNLEKAGVDTSPDTQKILVDSREATSVPHIYAIGDVVEGRPELTPIAIMAGRLLVQRLFGGSSDLMDYDNVPTTVFTPLEYGCVGLSEEEAVARHGQEHVEVYHAHYKPLEFTVAGRDASQCYVKMVCLREPPQLVLGLHFLGPNAGEVTQGFALGIKCGASYAQVMRTVGIHPTCSEEVVKLRISKRSGLDPTVTGCCG

SEQ ID NO: 100387 - protein, 144 aa, Homo sapiens
  MOD_RES (1)..(1): Any amino acid
XSLLMNRRKFLYQFKNVRWAKGRRETYLCYVVKRRDSATSFSLDFGYLRNKNGCHVELLFLRYISDWDLDPGRCYRVTWFTSWSPCYDCARHVADFLRGNPNLSLRIFTARLYFCEDRKAEPEGLRRLHRAGVQIAIMTFKAPV

SEQ ID NO: 100388 - protein, 40 aa, Homo sapiens
  MOD_RES (1)..(1): Any amino acid
XQVQGANSEFPWRRITALQVDVAGRKLPSCCPSGRCLPLC

SEQ ID NO: 100389 - protein, 35 aa, Homo sapiens
MAGEVLLSPLAPTENPASQEVATSGTPTNQGAVTC

SEQ ID NO: 100390 - protein, 143 aa, Homo sapiens
  MOD_RES (1)..(1): Any amino acid
XEEQHRGRSCEDFQNWKRMNDPEYQAQGLAMYLQENGIDCPKCKFSYALARGGCMHFHCTQCRHQFCSGCYNAFYAKNKCPEPNCRVKKSLHGHHPRDCLFYLRDWTALRLQKLLQDNNVMFNTEPPAGARAVPGGHTTKSIL

SEQ ID NO: 100391 - protein, 63 aa, Homo sapiens
EGTECETPAQKPGRHELGSPLREIAFAESLRGLQFLSPPLPSVSAGLGEPRPPDVELPLQPSL

SEQ ID NO: 100392 - protein, 106 aa, Homo sapiens
MSENLDKSNVNEAGKSKSNDSEEGLEDAVEGADEALQKAIKSDSSSPQRVQRPHSSPPRFVTVEELLETARGVTNMALAHEIVVNGDFQIKPVELPENSLKKRVKE

SEQ ID NO: 100393 - protein, 83 aa, Homo sapiens
MTDTVFSNSSNRWMYPSDRPLQSNDKEQLQAGWSVHPGGQPDRQRKQEELTDEEKEIINRVIARAEKMEEMEQERIGRLVDRL

SEQ ID NO: 100394 - protein, 228 aa, Homo sapiens
LKLRQQVIATATVYFKRFYARYSLKSIDPVLMAPTCVFLASKVEEFGVVSNTRLIAAATSVLKTRFSYAFPKEFPYRMNHILECEFYLLELMDCCLIVYHPYRPLLQYVQDMGQEDMLLPLAWRIVNDTYRTDLCLLYPPFMIALACLHVACVVQQKDARQWFAELSVDMEKILEIIRVILKLYEQWKNFDERKEMATILSKMPKPKPPPNRNSLSDSPLVAGPEAAR

SEQ ID NO: 100395 - protein, 66 aa, Homo sapiens
MYLYNVEHTCGTTAPHYQLLKQGESFAVHTCKSKSTRNPLLKWTVGEGALNEFAFSPDGKFLACVS

SEQ ID NO: 100396 - protein, 132 aa, Homo sapiens
MECPHLSSSVCIAPDSAKFPNGSPSSWCCSEMEFHHFTKAGLELLDSSNLPASASQSVGTTVCRSNKSPWVCLTCSSVHCGRYVNGHAKKHYEDAQVPLTNHKKSEKQDKVQHTVCMDCSSYSTYCYRCDDF

SEQ ID NO: 100397 - protein, 152 aa, Homo sapiens
PRAVGVSKQDIREQIWGYMESQNLADFPRPVHHRIPNFKGASHAAEQLPRLQAFKTARTIKVNPDAPQKSARFFVLESKKTLLVPTPRLRTGLFNKITPPPGATKDILRKCATSQVPPERLGRQDRISKTCSIGNCLTSSNWSVPAPVDPAR

SEQ ID NO: 100398 - protein, 79 aa, Homo sapiens
  MOD_RES (1)..(1): Any amino acid
XGRLSKDFCAREFEALRSCFAAAVGQEDAGGRLLGGTLSFTPVCCHGCRALVLMAPGGTYRMPRAERKWEWRRCDIPRC

SEQ ID NO: 100399 - protein, 188 aa, Homo sapiens
RRTCSPRLSVLQMDITKPVQIKDAYSKVAAMLQDRGLWAVINNAGVLGFPTDGELLLMTDYKQCMAVNFFGTVEVTKTFLPLLRKSKGRLVNVSSMGGGAPMERLASYGSSKAAVTMFSSVMRLELSKWGIKVASIQPGGFLTSRFLSPRTCDVHPGRNPEGPLGLTEHTLNPSLLSKMSTARDQLKG

SEQ ID NO: 100400 - protein, 121 aa, Homo sapiens
MAPRGRKRKAEAAVVAVAEKREKLANGGEGMEEATVVIEHCTSRVYGRNAAALSQALRLEAPELPVKVNPTKPRRGSFEVTLLRPDGSSAELWTGIKKGPPRKLKFPEPQEVVEELKKYLS

SEQ ID NO: 100401 - protein, 109 aa, Homo sapiens
  MOD_RES (1)..(1): Any amino acid
XANAAQQELKLLLHRSTLLFSQGKMYGYVDTLLTMLAMLLKMVLSSCRKTSSGLPLILHYAIFAVLTSVLTKDDWWNLLLKAIYSLCDLSRFQEAELLVDSSLEYYSFY

SEQ ID NO: 100402 - protein, 128 aa, Homo sapiens
MQALVLLLCIGALLGHSSCQNPASPPEEEEDPFFKVPVNKLAAAVSNFGYDLYRVRSSTSPTTNVLLSPLSVATALSALSLGAEQRTESIIHRALYYDLISSPDIHGTYKELLDTVTAPQKNLKSASR

SEQ ID NO: 100403 - protein, 157 aa, Homo sapiens
RQPRNPKTDKLVNERLISMAYGQIGMIQALGGFFTYFVILAENGFLPIHLLGLRVDWDDRWINDVEDSYGQQWTYEQRKIVEFTCHTAFFVSIVVVQWADLVICKTRRNSVFQQGMKNKILIFGLFEETALAAFLSYCPGMGVALRMYPLKTLTQYS

SEQ ID NO: 100404 - protein, 135 aa, Homo sapiens
MAKDFQDIQQLSSEENDHPFHQGEGPGTRRLNPRRGNPFLKGPPPAQPLAQRLCSMVCFSLLALSFNILLLVVICVTGSQSAQLQAELRSLKEAFSNFSSSTLTEVQAISTHGGSVGDKITSLGAKLEKQQQDLK

SEQ ID NO: 100405 - protein, 170 aa, Homo sapiens
EEFQFLQAQYHSLKLECEKLASEKTEMQRHYVMYYEMSYGLNIEMHKQTEIAKRLNTICAQVIPFLSQEHQQQVAQAVERAKQVTMAELNAIIGQQQLQAQHLSHGHGPPVPLTPHPSGLQPPGIPPLGGSAGLLALSSALSGQSHLAIKDDKKHHDAEHHRGERPGKPD

SEQ ID NO: 100406 - protein, 135 aa, Homo sapiens
MGTKPRRPPRPHLVSPDKAPLSKSLLLVPSALSLLLALLLPHCQKLFVYDLHAVKNDFQIWRLICGRIICLDLKDTFCSSLLIYNFRIFERRYGSRKFASFLLGSWVLSALFDFLLIEAMQYFFGITAASNLPSG

SEQ ID NO: 100407 - protein, 648 aa, Homo sapiens
MNPYDRGSAFAIGSDGLCCQSREVKEWHGCRATKGLMKGKHYYEVSCHDQGLCRVGWSTMQASLDLGTDKFGFGFGGTGKKSHNKQFDNYGEEFTMHDTIGCYLDIDKGHVKFSKNGKDLGLAFEIPPHMKNQALFPACVLKNAELKFNFGEEEFKFPPKDGFVALSKAPDGYIVKSQHSGNAQVTQTKFLPNAPKALIVEPSRELAEQTLNNIKQFKKYIDNPKLRELLIIGGVAARDQLSVLENGVDIVVGTPGRLDDLVSTGKLNLSQVRFLVLDEADGLLSQGYSDFINRMHNQIPQVTSDGKRLQVIVCSATLHSFDVKKLSEKIMHFPTWVDLKGEDSVPDTVHHVVVPVNPKTDRLWERLGKSHIRTDDVHAKDNTRPGANSPEMWSEAIKILKGEYAVRAIKEHKMDQAIIFCRTKIDCDNLEQYFIQQGGGPDKKGHQFSCVCLHGDRKPHERKQNLERFKKGDVRFLICTDVAARGIDIHGVPYVINVTLPDEKQNYVHRIGRVGRAERMGLAISLVATEKEKVWYHVCSSRGKGCYNTRLKEDGGCTIWYNEMQLLSEIEEHLNCTISQVEPDIKVPVDEFDGKVTYGQKRAAGGGSYKGHVDILAPTVQELAALEKEAQTSFLHLGYLPNQLFRTF

SEQ ID NO: 100408 - protein, 73 aa, Homo sapiens
MRIRMTDGRTLVGCFLCTDRDCNVILGSAQEFLKPSDSFSAGEPRVLGLAMVPGHHIVSIEVQRESLTGPPYL

SEQ ID NO: 100409 - protein, 736 aa, Homo sapiens
MWMAWCVAALSVVAVCGTSHETNTVLRVTKDVLSNAISGMLQQSDALHSALREVPLGKARGDGGGPLLGGLLGGSGSGGGGGGGLLGGLLGGGGGGGGSDLLGGGLLGGSGSSGGELLGGGGGSGGGLLGGSGGGLLGGSGGGLLGGSRGGLLGGSGGGLLGGGRHHYNDYRRIEFPRGVGDIPYNDFHVRGPPPVYTNGKKLDGIYQYGHIETNDNTAQLGGKYRYGEILESEGSIRDLRNSGYRSAENAYGGHRGLGRYRAAPVGRLHRRELQPGEIPPGVATGAVGPGGLLGTGGMLAADGILAGQGGLLGGGGLLGDGGLLGGGGVLGVLGEGGILSTVQGITGLRIVELTLPRVSVRLLPGVGVYLSLYTRVAINGKSLIGFLDIAVEVNITAKVRLTMDRTGYPRLVIERCDTLLGGIKVKLLRGLLPNLVDNLVNRVLADVLPDLLCPIVDVVLGLVNDQLGLVDSLIPLGILGSVQYTFSSLPLVTGEFLELDLNTLVGEAGGGLIDYPLGWPAVSPKPMPELPPMGDNTKSQLAMSANFLGSVLTLLQKQHALDLDITNGMFEELPPLTTATLGALIPKVFQQYPESCPLIIRIQVLNPPSVMLQKDKALVKVLATAEVMVSQPKDLETTICLIDVDTEFLASFSTEGDKLMIDAKLEKTSLNLRTSNVGNFDIGLMEVLVEKIFDLAFMPAMNAVLGSGVPLPKILNIDFSNADIDVLEDLLVLSA

SEQ ID NO: 100410 - protein, 287 aa, Homo sapiens
MSGESVVSSAVPAAATRTTSFKGTSPSSKYVKLNVGGALYYTTMQTLTKQDTMLKAMFSGRMEVLTDSEGWILIDRCGKHFGTILNYLRDGAVPLPESRREIEELLAEAKYYLVQGLVEECQAALQNKDTYEPFCKVPVITSSKEEQKLIATSNKPAVKLLYNRSNNKYSYTRVLFIKDVIGDEICCWSFYGQGRKIAEVCCTSIVYATEKKQTKVEFPEARIYEETLNILLYEAQDGRGPDNALLEATGGAAGRSHHLDEDEERERIERVRRIHIKRPDDRAHLHQ

SEQ ID NO: 100411 - protein, 94 aa, Homo sapiens
MAPQSLPSSRMAPLGMLLGLLMAACFTFCLSHQNLKEFALTNPEKSSTKETERKETKAEEELDAEVLEVFHPTHEWQALQPGQAVPAGSHVRLN

SEQ ID NO: 100412 - protein, 792 aa, Homo sapiens
MEKQKPFALFVPPRSSSSQVSAVKPQTLGGDSTFFKSFNKCTEDDFEFPFAKTNLSKNGENIDSDPALQKVNFLPVLEQVGNSDCHYQEGLKDSDLENSEGLSRVYSKLYKEAEKIKKWKVSTEAELRQKESKLQENRKIIEAQRKAIQELQFGNEKVSLKLEEGIQENKDLIKENNATRHLCNLLKETCARSAEKTKKYEYEREETRQVYMDLNNNIEKMITAFEELRVQAENSRLEMHFKLKEDYEKIQHLEQEYKKEINDKEKQVSLLLIQITEKENKMKDLTFLLEESRDKVNQLEEKTKLQSENLKQSIEKQHHLTKELEDIKVSLQRSVSTQKALEEDLQIATKTICQLTEEKETQMEESNKARAAHSFVVTEFETTVCSLEELLRTEQQRLEKNEDQLKILTMELQKKSSELEEMTKLTNNKEVELEELKKVLGEKETLLYENKQFEKIAEELKGTEQELIGLLQAREKEVHDLEIQLTAITTSEQYYSKEVKDLKTELENEKLKNTELTSHCNKLSLENKELTQETSDMTLELKNQQEDINNNKKQEERMLKQIENLQETETQLRNELEYVREELKQKRDEVKCKLDKSEENCNNLRKQVENKNKYIEELQQENKALKKKGTAESKQLNVYEIKVNKLELELESAKQKFGEITDTYQKEIEDKKISEENLLEEVEKAKVIADEAVKLQKEIDKRCQHKIAEMVALMEKHKHQYDKIIEERDSELGLYKSKEQEQSSLRASLEIELSNLKAELLSVKKQLEIEREEKEKLKREAKENTATLKEKK

SEQ ID NO: 100413 - protein, 98 aa, Homo sapiens
MDSVMPSQEPPVDDKNEDADLPSEETDGIAYISSSRKHDSIKDDSEDLKPVIDGMDGIKISQGLGLQDFDLIRVIGRGSYAKVLLVRLKKNDQIYAMK

SEQ ID NO: 100414 - protein, 56 aa, Homo sapiens
MVNVPDIFSHDTQGLLRKKLIEASFQKVILDGYGSCGPQNLNLRKEWESEGKIILW

SEQ ID NO: 100415 - protein, 35 aa, Homo sapiens
MAQVLRGTVTDFPGFDERADAETLRKAMKGLGSSG

SEQ ID NO: 100416 - protein, 231 aa, Homo sapiens
  MOD_RES (1)..(1): Any amino acid
XCAARQCCNRYSSRRKQLTFHRFPFSRPELLKEWVLNIGRGNFKPKQHTVICSEHFRPECFSAFGNRKNLKHNAVPTVFAFQDPTQQVRENTDPASERGNASSSQKEKVLPEAGAGEDSPGRNMDTALEELQLPPNAEGHVKQVRLSAKVVCGWTQDDLLQTKWKPVSTHHETCVAEAGCAAWVSELPSQILHHGVGTSGFWGSSPECLAALGLCCVRVWWPAHHGPPSCW

SEQ ID NO: 100417 - protein, 169 aa, Homo sapiens
MAFYSYNSVLAIARTRFPSHFVHPTCSSYSPSCAFLHLPDSHLNKTCMKNYESKKYSDPSQPGNTVLHPGTRLIQKLHTSTCWLQEVPGKPQLEQATKHPQVTSPQATKETGMEIKEGKQSYRQKIMDELKYYYNGFYLLWIDAKVAARMVWRLLHGQVLTRRERRRCF

SEQ ID NO: 100418 - protein, 171 aa, Homo sapiens
MMLGTEGGEGFVVKVRGLPWSCSADEVQRFFSDCKIQNGAQGIRFIYTREGRPSGEAFVELESEDEVKLALKKDRETMGHRYVEVFKSNNVEMDWVLKHTGPNSPDTANDGFVRLRGLPFGCSKEEIVQFFSGILKSLRAVELKLELIMIHHESLWPCSGQVLMTDLGLVE

SEQ ID NO: 100419 - protein, 268 aa, Homo sapiens
HNHHQELAAAKMELERSIDISRRQSKEHICRITDLQEELRHREHHISELDKEVQHLHENISALTKELEFKGKEILRIRSESNQQIRLHEQDLNKRLEKELDVMTADHLREKNIMRADFNKTNELLKEINAALQVSLEEMEEKYLMRESKPEDIQMITELKAMLTERDQIIKKLIQKKKNDKSPTNRFVSVPNLSALESGGVGNGHPNRLDPIPNSPVHDIEFNSSKPLPQPVPPKGPKTFLSPAQSEASPVASPDPQRQEWFARYFTF

SEQ ID NO: 100420 - protein, 91 aa, Homo sapiens
  MOD_RES (1)..(1): Any amino acid
XFRKVVHIEQGGLVKPERDDTEFQHPCFLRGQEQLLENIKRKVTSVSTLKSEDIKIRQDSVTKLLTDVQLMKGKQECMDSKLLAMKHSFSS

SEQ ID NO: 100421 - protein, 135 aa, Homo sapiens
MAAQCVTKVALNVSCANLLDKDIGSKSDPLCVLFLNTSGQQWYEVERTERIKNCLNPQFSKTFIIDYYFEVVQKLKFGVYDIDNKTIELSDDDFLGECECTLGQIVSSKKLTRPLVMKTGRPAGKGSITISAEEI

SEQ ID NO: 100422 - protein, 372 aa, Homo sapiens
MTLRAAVFDLDGVLALPAVFGVLGRTEEALALPRGLLNDAFQKGGPEGATTRLMKGEITLSQPRVRLHFVELGSGPAVCLCHGFPESWYSWRYQIPALAQAGYRVLAMDMKGYGESSAPPEIEEYCMEVLCKEMVTFLDKLGLSQAVFIGHDWGGMLVWYMALFYPERVRAVASLNTPFIPANPNMSPLESIKANPVFDYQLYFQEPGVAEAELEQNLSRTFKSLFRASDESVLSMHKVCEAGGLFVNSPEEPSLSRMVTEEEIQFYVQQFKKSGFRGPLNWYRNMERNWKWACKSLGRKILIPALMVTAEKDFVLVPQMSQHMEDWIPHLKRGHIEDCGHWTQMDKPTEVNQILIKWLDSDARNPPVVSKM

SEQ ID NO: 100423 - protein, 99 aa, Homo sapiens
MTDEPFQNVTLDAYKDKYVCFDQFPSDSHRLSYTTLLLVLQYFGPLCFIFICYFKIYIRLKRRNNMMDKMRDNKYRSSETKRINIMLLSIVVAFAVCWL

SEQ ID NO: 100424 - protein, 118 aa, Homo sapiens
MEDEERQKKLEAGKAKLAQFRQRKAQSDGQSPSKKQKKKRKTSSSKHDVSAHHDLNIDQSQCNEMYINSSQRVESTVIPESTIMRTLHSGEITSHEQGFSVELESEISTTADDCSSEM

SEQ ID NO: 100425 - protein, 261 aa, Homo sapiens
EACDDLELADDNLKEGTICTESSQQEPITKSGFTRLSSSPCYYFYQAEDGQHMFLHPVNVRCLVREYGSLERSPEKISATVVEIAGYSMSEDVRQRHRYLSHLPLTCEFSICELALQPPVVSKETLEMFSDDIEKRKRQRQKKAREERRRERRIEIEENKKQGKYPEVHIPLENLQQFPAFNSYTCSSDSALGPTSTEGHGALSISPLSRSPGSHADFLLTPLSPTASQGSPSFCVGSLEEDSPFPSFAQEFYWPVVGSES

SEQ ID NO: 100426 - protein, 135 aa, Homo sapiens
MLQTKDLIWTLFFLGTAGEPSAPKLEGQMGEDGNSIKVNLIKQDDGGSPIRHYLVRYRALSSEWKPEIRLPSGSDHVMLKSLDWNAEYEVYVVAENQQGKSKAAHFVFRTSAQPTAIPANGSPTSGLSTGAIVGI

SEQ ID NO: 100427 - protein, 168 aa, Homo sapiens
MAKPQVVVAPVLMSKLSVNAPEFYPSGYSSSYTESYEDGCEDYPTLSEYVQDFLNHLTEQPGSFETEIEQFAETLNGCVTTDDALQELVELIYQQATSIPNFSYMGARLCNYLSHHLTISPQSGNFRQLLLQRCRTEYEVKDQAAKGDEVTRKRFHAFVLFLGELYLN

SEQ ID NO: 100428 - protein, 187 aa, Homo sapiens
MDKAMVEFATLDRQLNHYVKAVQSTINHVKEERPEKIPDLKLLVEKKFLALQSKNSDADFQNNEKFVQFKQQLKELKKQCGLQADREADGTEGVDEDIIVTQSQTNFTCPITKEEMKKPVKNKVCGHTYEEDAIVRMIESRQKRKKKAYCPQIGCSHTDIRKSDLIQDEALRRAIENHNKKRHRHSE

SEQ ID NO: 100429 - protein, 286 aa, Homo sapiens
  MOD_RES (1)..(1): Any amino acid
XGYQDVDTSLQSAVITKVKGVAFTNTSDLGQRIWDVADYVIPAQGENVFFVVTNLIVTPNQRQNVCAENEGIPDGACSKDSDCHAGEAVTAGNGVKTGRCLRRENLARGTCEIFAWCPLETSSRPEEPFLKEAEDFTIFIKNHIRFPKFNFSNRLDNKLSKSVSSGYNFRFARYYRDAAGVEFRTLMKAYGIRFDVMVNGKGAFFCDLVLIYLIKKREFYRDKKYEEVRGLEDSSQEAEDEASGLGLSEQLTSGPGLLGMPEQQELQEPPEAKRGSSSQKGNGSVC

SEQ ID NO: 100430 - protein, 248 aa, Homo sapiens
MCQREKRWQLGVLTQTVGPWPRPVAYLSKQLDGVFKGWPPCLRALAATALLVQEADKLTLGQNRNIKAPHAVVTLMNTKGHHWLMSARLTKYQSLLCENPRITIEVCNTLNPATLFPVSESPVEHDCVEVLDSVYSSRPDLRDQPWASVDWELYVDGSSFINPQGERFAGYAVVTLDTVVEARSLPQGTSAQKAELIALIRALELSEGIKDFLLLCGRILLLLALLTLTISVTTSWLNSFKSPQVYLK

SEQ ID NO: 100431 - protein, 301 aa, Homo sapiens
MSEYIRVTEDENDEPIEIPSEDDGTVLLSTVTAQFPGACGLRYRNPVSQCMRGVRLVEGILHAPDAGWGNLVYVVNYPKDNKRKMDETDASSAVKVKRAVQKTSDLIVLGLPWKTTEQDLKEYFSTFGEVLMVQVKKDLKTGHSKGFGFVRFTEYETQVKVMSQRHMIDGRWCDCKLPNSKQSQDEPLRSRKVFVGRCTEDMTEDELREFFSQYGDVMDVFIPKPFRAFAFVTFADDQIAQSLCGEDLIIKGISVHISNAEPKHNSNRQLERSGRFGGNPGILSTCFLIQEFVITHHRPRL

SEQ ID NO: 100432 - protein, 741 aa, Homo sapiens
MSVKEGAQRKWAALKEKLGPQDSDPTEANLESADPELCIRLLQMPSVVNYSGLRKRLEGSDGGWMVQFLEQSGLDLLLEALARLSGRGVARISDALLQLTCVSCVRAVMNSRQGIEYILSNQGYVRQLSQALDTSNVMVKKQVFELLAALCIYSPEGHVLTLDALDHYKTVCSQQYRFSIVMNELSGSDNVPYVVTLLSVINAVILGPEDLRARTQLRNEFIGLQLLDVLARLRDLEDADLLIQLEAFEEAKAEDEEELLRVSGGVDMSSHQEVFASLFHKVSCSPVSAQLLSVLQGLLHLEPTLRSSQLLWEALESLVNRAVLLASDAQECTLEEVVERLLSVKGRPRPSPLVKAHKSVQANLDQSQRGSSPQNTTTPKPSVEGQQPAAAAACEPVDHAQSESILKVSQPRALEQQASTPPPPPPPPLLPGSSAEPPPPPPPPPLPSVGAKALPTAPPPPPLPGLGAMAPPAPPLPPPLPGSCEFLPPPPPPLPGLGCPPPPPPLLPGMGWGPPPPPPPLLPCTCSPPVAGGMEEVIVAQVDHGLGSAWVPSHRRVNPPTLRMKKLNWQKLPSNVAREHNSMWASLSSPDAEAVEPDFSSIERLFSFPAAKPKEPTMVAPRARKEPKEITFLDAKKSLNLNIFLKQFKCSNEEVAAMIRAGDTTKFDVEVLKQLLKLLPEKHEIENLRAFTEERAKLASADHFYLLLLAIPWPAHQPPAAHLLPADPENWELPQLRQPHR

SEQ ID NO: 100433 - protein, 77 aa, Homo sapiens
MMHQIYSCSDENIEVFTTVIPSKVSSPARRRAKSSQHLLTKNILSLFLEFTGITKDPETPSMRAPSAKLLPWGSMGP

SEQ ID NO: 100434 - protein, 110 aa, Homo sapiens
MNFADEFAKLQDYRQAEVERLEAKVVEPLKTYGTIVKMKRDDLKATLTARNREAKQLTQLERTRQRNPSDRHVISQAETELQRAAMDASRTSRHLEETINNFERQKMKDI

SEQ ID NO: 100435 - protein, 136 aa, Homo sapiens
MIEVLTTTDSQKLLHQLNALLEQESRCQPKVCGLRLIESAHDNGLRMTARLRDFEVKDLLSLTQFFGFDTETFSLAVNLLDRFLSKMKVQPKHLGCVGLSCFYLAVKSIEEERNVPLATDLIRISQYRFTVSDLMR

SEQ ID NO: 100436 - protein, 70 aa, Homo sapiens
MSKIRGLPPEVREPGPGVELGVENGLLCQLIHSPEFNLFSNSVVFESNFIQLKKAFQKGLKPFFERLLRF

SEQ ID NO: 100437 - protein, 97 aa, Homo sapiens
MQKASHKNKKERGVSNKVKTSVHNLSKTQQTKLTVGSLGLGLIIIQHGPYLQITHLIRKGAAANDGKLQPGCTGSMAGEASGNLQSWQKVKRKEVMF

SEQ ID NO: 100438 - protein, 203 aa, Homo sapiens
  MOD_RES (1)..(1): Any amino acid
XRRLLTKTNRMPRWAERLFPANVAHSVYVLEDSIVDPQNQTMTTFTWNINHARLMVVEERCVYCVNSDNSGWTEIRREAWVSSSLFGVSRAVQEFGLARFKSNVTKTMKGFEYILAKLQGKLGWSFRHLLKAATCRSRQARPLPKHLLRQPRKPRRRQRRRHWQLQRRPRTSPARRPPRSSSSSNSLCSQSTTTTAPQTARLS

SEQ ID NO: 100439 - protein, 44 aa, Homo sapiens
MNPGFDLSRRNPQEDFELIQRIGSGTYGDVYKEKTLQLCSKKLL

SEQ ID NO: 100440 - protein, 73 aa, Homo sapiens
MDGKWRCCSQLEKLATGCAQYDPTKNASKKPLPPTPEDNRRPLWEPEETVVIALYDYQTNDPQELALRRNEEY

SEQ ID NO: 100441 - protein, 1094 aa, Homo sapiens [sequence omitted]

SEQ ID NO: 100442 - protein, 740 aa, Homo sapiens
MDPSAPQPRAETSGKDIWHPGERCLAPSPDNGKLCEASIKSITVDENGKSFAVVLYADFQERKIPLKQLQEVKFVKDCPRNLIFDDEDLEKPYFPNRKFPSSSVAFKLSDNGDSIPYTINRYLRDYQREGTRFLYGHYIHGGGCILGDDMGLGKTVQVISFLAAVLHKKGTREDIENNMPEFLLRSMKKEPLSSTAKKMFLIVAPLSVLYNWKDELDTWGYFRVTVLHGNRKDNELIRVKQRKCEIALTTYETLRLCLDELNSLEWSAVIVDEAHRIKNPKARVTEVMKALKCNVRIGLTGTILQNNMKELWCVMDWAVPGLLGSGTYFKKQFSDPVEHGQRHTATKRELATGRKAMQRLAKKMSGWFLRRTKTLIKDQLPKKEDRMVYCSLTDFQKAVYQTVLETEDVTLILQSSEPCTCRSGQKRRNCCYKTNSHGETVKTLYLSYLTVLQKVANHVALLQAASTSKQQETLIKRICDQVFSRFPDFVQKSKDAAFETLSDPKYSGKMKVLQQLLNHCRKNRDKVLLFSFSTKLLDVLQQYCMASGLDYRRLDGSTKSEERLKIVKEFNSTQDVNICLVSTMAGGLGLNFVGANVVVLFDPTWNPANDLQAIDRAYRIGQCRDVKVLRLISLGTVEEIMYLRQIYKQQLHCVVVGSENAKRYFEAVQGSKEHQGELFGIHNLFKFRSQGSCLTKDILEREGQVEAGIMTATTWLKEGPPAHKLEMRDWKHLLDDSKLQ

SEQ ID NO: 100443 - protein, 103 aa, Homo sapiens
MAALAYNLGKREINHYFSVRSAKVLALVAVLLLAACHLASRRYRGNDSCEYLLSSGRFLGEKVWQPHSCMMHKYKISMKTFLLKTRLHQLKWIFCGILKLMVL

SEQ ID NO: 100444 - protein, 329 aa, Homo sapiens
  MOD_RES (1)..(1): Any amino acid
XPRSAANLISNACLVGASTALGRCHPGPSQRPTWQRGQPCFWTNTGRSPSCSEATSSWCLLEMTSDMTSPRSGMPSSSTTNGSLTSSTAGLTSMCRGAEVLYSLAAAHARRSGLAGRYPLSDFTLLTEARRTLGLFQHHDAITGTAKEAVVVDYGVRLLRSLVNLKQVIIHAAHYLVLGDKETYHFDPEAPFLQVDDTRLSHDALPERTVIQLDSSPRFVVLFNPLEQERFSMVSLLVNSPRVRVLSEEGQPLAVQISAHWSSATEAVPDVYQVSVPVRLPALGLGVLQLQLGLDGHRTLPSSVRIYLHGRQLSVSRHEAFPLRVIDSG

SEQ ID NO: 100445 - protein, 76 aa, Homo sapiens
MGCCWTLAAPLPKLSMEPSPTTTACLPLALMSRPCSLPSLPRQPATSLMCLLQTHRAWSSMSTWTVPGSTAPAWLC

SEQ ID NO: 100446 - protein, 36 aa, Homo sapiens
  MOD_RES (1)..(1): Any amino acid
XMCNTNMSVPTDGAVTTSQIPASEQETLNHRTQVHL

SEQ ID NO: 100447 - protein, 520 aa, Homo sapiens
MWRVCARRAQNVAPWAGLEARWTALQEVPGTPRVTSRSGPAPARRNSVTTGYGGVRALCGWTPSSGATPRNRLLLQLLGSPGRRYYSLPPHQKVPLPSLSPTMQAGTIARWEKKEGDKINEGDLLAEIETDKATIGFEVQEEGYLAKILVPEGTRDVPLGTPLCIIVEKEADISAFADYRPTEVTDLKPQVPPPTPPPVAAVPPTPQPLAPTPSAPCPATPAGPKGRVFVSPLAKKLAVEKGIDLTQVKGTGPDGRITKKDIDSFVPSKVAPAPAAVVPPTGPGMAPVPTGVFTDIPISNIRRVIAQRLMQSKQTIPHYYLSIDVNMGEVLLVRKELNKILEGRSKISVNDFIIKASALACLKVPEANSSWMDTVIRQNHVVDVSVAVSTPAGLITPIVFNAHIKGVETIANDVVSLATKAREGKLQPHEFQGGTFTISNLGMFGIKNFSAIINPPQACILAIGASEDKLVPADNEKGFDVASMMSVTLSCDHRVVDGAVGAQWLAEFRKYLEKPITMLL

SEQ ID NO: 100448 - protein, 195 aa, Homo sapiens
MVDIIFHYPFLGAMGDHSKKKPGTAMCVGCGSQIHDQFILRVSPDLEWHAACLKCAECSQYLDETCTCFVRDGKTYCKRDYVRRWVGPAARVAPARAQADGEDDPRADCAEREAAAHSADLLRRQPAARRSHEGAAGGDDRPEPAGHPRLVPEQALQGQEEIHSHEAAAAAAAQRQDEPSGTDWDAPGGGQSHPP

SEQ ID NO: 100449 - protein, 366 aa, Homo sapiens
MALMQELYSTPASRLDSFVAQWLQPHREWKEEVLDAVRTVEEFLRQEHFQGKRGLDQDVRVLKVVKVGSFGNGTVLRSTREVELVAFLSCFHSFQEAAKHHKDVLRLIWKTMWQSQDLLDLGLEDLRMEQRVPDALVFTIQTRGTAEPITVTIVPAYRALGPSLPNSQPPPEVYVSLIKACGGPGNFCPSFSELQRNFVKHRPTKLKSLLRLVKHWYQQYVKARSPRANLPPLYALELLTIYAWEMGTEEDENFMLDEGFTTVMDLLLEYEVICIYWTKYYTLHNAIIEDCVRKQLKKERPIILDPADPTLNVAEGYRWDIVAQRASQCLKQDCCYDNRENPISSWNVKLWRLGSPSQDTGRFGVW

SEQ ID NO: 100450 - protein, 525 aa, Homo sapiens
TGGGLEPQANGETPQVAVIVRPDDRSQGAIIADRPGLPGPEHSPSESQPSSPSPTPSPSPVLEPGSEPNLAVLSIPGDTMTTIQMSVEESTPISRETGEPYRLSPEPTPLAEPILEVEVTLSKPVPESEFSSSPLQAPTPLASHTVEIHEPNGMVPSEDLEPEVESSPELAPPPACPSESPVPIAPTAQPEELLNGAPSPPAVDLSPVSEPEEQAKEVTASMAPPTIPSATPATAPSATSPAQEEEMEEEEEEEEGEAGEAGEAESEKGGEELLPPESTPIPANLSQNLEAAAATQVAVSVPKRRRKIKELNKKEAVGDLLDAFKEANPAVPEVENQPPAGSNPGPESEGSGVPPRPEEADETWDSKEDKIHNAENIQPGEQKYEYKSDQWKPLNLEEKKRYDREFLLGFQFIFASMQKPEGLPHISDVVLDKANKTPLRPLDPTRLQGINCGPDFTPSFANLGRTTLSTRGPPRGGPGWPGTPALSAGTPKRTTQDHCHSVNDRRYKTEQSRESLETQQQADGG

SEQ ID NO: 100451 - protein, 109 aa, Homo sapiens
  MOD_RES (1)..(1): Any amino acid
XTAIKIQFTSLYHKEEAPASPLRPLYPQISPLKIHIPEPDLRSMVSPVPSPTGTISVPNSCPASPRGAGSSSYRFVQNVTSDLQLAAEFAAKAASEQQADTSGGDSPKV

SEQ ID NO: 100452 - protein, 604 aa, Homo sapiens
AAPGGGVDTRDAEMPATEKDLAEDAPWKKIQQNTFTRWCNEHLKCVSKRIANLQTDLSDGLRLIALLEVLSQKKMHRKHNQRPTFRQMQLENVSVALEFLDRESIKLVSIDSKAIVDGNLKLILGLIWTLILHYSISMPMWDEEEDEEAKKQTPKQRLLGWIQNKLPQLPITNFSRDWQSGRALGALVDSCAPGLCPDWDSWDASKPVTNAREAMQQADDWLGIPQVITPEEIVDPNVDEHSVMTYLSQFPKAKLKPGAPLRPKLNPKKARAYGPGIEPTGNMVKKRAEFTVETRSAGQGEVLVYVEDPAGHQEEAKVTANNDKNRTFSVWYVPEVTGTHKVTVLFAGQHIAKSPFEVYVDKSQGDASKVTAQGPGLEPSGNIANKTTYFEIFTAGAGTGEVEVVIQDPMGQKGTVEPQLEARGDSTYRCSYQPTMEGVHTVHVTFAGVPIPRSPYTVTVGQACNPSACRAVGRGLQPKGVRVKETADFKVYTKGAGSGELKVTVKGPRRGAREAEGPGGWRVWLRVLPHGPWNLYRHHHVGWSEHRAQSLRSEGGHRVWQSEGTGLGPWAGGRRRWQVSRLCGGGYRGRRGHAGLLGGRAIAG

SEQ ID NO: 100453 - protein, 135 aa, Homo sapiens
MAQDSVDLSCDYQFWMQKLSVWDQASTLETQQDTCLHVAQFQEFLRKMYEALKEMDSNTVIERFPTIGQLLAKACWNPFILAYDESQKILIWCLCCLINKEPQNSGQSKLNSWIQGVLSHILSALRFDKEVALFT

SEQ ID NO: 100454 - protein, 501 aa, Homo sapiens
MNRYTTMRQLGDGTYGSVLMGKSNESGELVAIKRMKRKFYSWDECMNLREVKSLKKLNHANVIKLKEVIRENDHLYFIFEYMKENLYQLMKDRNKLFPESVIRNIMYQILQGLAFIHKHGFFHRDMKPENLLCMGPELVKIADFGLARELRSQPPYTDYVSTRWYRAPEVLLRSSVYSSPIDVWAVGSIMAELYMLRPLFPGTSEVDEIFKICQVLGTPKKSDWPEGYQLASSMNFRFPQCVPINLKTLIPNASNEAIQLMTEMLNWDPKKRPTASQALKHPYFQVGQVLGPSSNHLESKQSLNKQLQPLESKPSLVEVEPKPLPDIIDQVVGQPQPKTSQQPLQPIQPPQNLSVQQPPKQQSQEKPPQTLFPSIVKNMPTKPNGTLSHKSGRRRWGQTIFKSGDSWEELEDYDFGASHSKKPSMGVFKEKRKKDSPFRLPEPVPSGSNHSTGENKSLPAVTSLKSDSELSTAPTSKQYYLKQSRYLPGQHDIILQGLADL

SEQ ID NO: 100455 - protein, 133 aa, Homo sapiens
MWNWLRLVKDSVSEKTIGLMRMQFWKKTVEDIYCDNPPHQPVAIELWKAVKRHNLTKRWLMKIVDEREKNLDDKAYRNIKELENYAENTQSSLLYLTLEILGIKDLHADHAASHIGKAQGIVTCLRATPYHGS

SEQ ID NO: 100456 - protein, 228 aa, Homo sapiens
  MOD_RES (1)..(1): Any amino acid
XITFYQTLWARPRRARQARRVGGGGGTKAGGPGALGTRPAFEVPAIVVEDARGKRRSSLDGSESAKTSLQVTNLVVSFFSLKSDSAPPWMVLAVLWCSMAQTLLLPSFIWSCERYRADVRTVWEQCVAIMSEEDGDDDGGCDDYAEGRVCKVRFDANGATGPGSRDPAQVKLLPGRHMLFPPLERVHYLQLKKLDLAAAAAHTFFVANPMHLQMREDMAKYRRMSGVR

SEQ ID NO: 100457 - protein, 94 aa, Homo sapiens
MMLSCLFLLKALLALGSLESWITAGEHGRGGDCPKVLVGLCIVGCVMDENCQAGEKCCKSGCGRFCVPPVLPPKLTMNPNWTVRSDSELEIPVP

SEQ ID NO: 100458 - protein, 422 aa, Homo sapiens
MRNWLVLLCPCVLGAALHLWLRLRSPPPACASGAGPAGGVSLLLPRLECNGAVSAHPNLHLPGSRDSPASASQVAGITDQLALFPQWKSTHYDVVVGVLSARNNHELRNVIRSTWMRHLLQHPTLSQRVLVKFIIGAHGCEVPVEDREDPYSCKLLNITNPVLNQEIEAFSLSEDTSSGLPEDRVVSVSFRVLYPIVITSLGVFYDANDVGFQRNITVKLYQAEQEEALFIARFSPPSCGVQVNKLWYKPVEQFILPESFEGTIVWESQDLHGLVSRNLHKVTVNDGGGVLRVITAGEGALPHEFLEGVEGVAGGFIYTIQEGDALLHNLHSRPQRLIDHIRNLHEEDALLKEESSIYDDIVFVDVVDTYRNVPAKLLNFYRWQSGKLPRTVLYGYSSLVLRGRWSNWFMEGLWKQRASICC

SEQ ID NO: 100459 - protein, 112 aa, Homo sapiens
MLGASPNRPDSSGKRSVKFNKGYTALSQSPDENLVSLDSDSDGELGSRYSSGYSSAEQVNQDVSRQLLQDGYHLDEIPDDEDLDLIPPKPMASSTCSCCWCCLGDSSSCTLQ

SEQ ID NO: 100460 - protein, 90 aa, Homo sapiens
MHYMYRPRSRSPRICHRFISRYRSRSRSRSPYRIRNPFRGSPKCFRSVSPERMSRRSVRSSDRKKALEDVVQRSGHGTEFNKQKHLEAAD

SEQ ID NO: 100461 - protein, 1960 aa, Homo sapiens
MVSEGSAAGRDFAGMEEVRQLHVRFCKGIKIWHQAWFLCSLLGREPQEREAGCQLWLCTLSAVLKVGWLFPLSEVPNFTLLKDGCGCWRLKEDQIYNAVRREETENTVGSLLHFLTKLPASETAHGRISVGPCLKQCVRDTVCEYRATLQRTSISQYITGSLLEATTSLGARSGLLSTFGGSTGRMMLKERQPGPSVANSNALPSSSAGISKELIDLQPLIQFPEEVASILMEQEQTIYRRVLPVDYLCFLTRDLGTPECQSSLPCLKASISASILTTQNGEHNALEDLVMRFNEVSSWVTWLILTAGSMEEKREVFSYLVHVAKCCWNMGNYNAVMEFLAGLRSRKVLKMWQFMDQSDIETMRSLKDAMAQHESSCEYRKVVTRALHIPGCKVVPFCGVFLKELCEVLDGASGLMKLCPRYNSQEETLEVIRSCNRSLETDEEDSPSEGNSSRKSSLKDKSRWQFIIGDLLDSDNDIFEQSKEYDSHGSEDSQKAFDHGTELIPWYVLSIQADVHQFLLQGATVIHYDQDTHLSARCFLQLQPDNSTLTWVKPTTASPASSKAKLGVLNNTAEPGKFPLLGNAGLSSLTEGVLDLFAVKAVYMGHPGIDIHTVCVQNKLGSMFLSETGVTLLYGLQTTDNRLLHFVAPKHTAKMLFSGLLELTRAVRKMRKFPDQRQQWLRKQYVSLYQEDGRYEGPTLAHAVELFGGRRWSARNPSPGTSAKNAEKPNMQRNNTLGISTTKKKKKILMRGESGEVTDDEMATRKAKMHKECRSRSGSDPQDINEQEESEVNAIANPPNPLPSRRAHSLTTAGSPNLAAGTSSPIRPVSSPVLSSSNKSPSSAWSSSSWHGRIKGGMKGFQSFMVSDSNMSFVEFVELFKSFSVRSRKDLKDLFDVYAVPCNRSGSESAPLYTNLTIDENTSDLQPDLDLLTRNVSDLGLFIKSKQQLSDNQRQISDAIAAASIVTNGTGIESTSLGIFGVGILQLNDFLVNCQGEHCTYDEILSIIQKFEPSISMCHQGLMSFEGFARFLMDKENFASKNDESQENIKELQLPLSYYYIESSHNTYLTGHQLKGESSVELYSQVLLQGCRSVELDCWDGDDGMPIIYHGHTLTTKIPFKEVVEAIDRSAFINSDLPIIISIENHCSLPQQRKMAEIFKTVFGEKLVTKFLFETDFSDDPMLPSPDQLRKKVLLKNKKLKAHQTPVDILKQKAHQLASMQVQAYNGGNANPRPANNEEEEDEEDEYDYDYESLSDDNILEDRPENKSCNDKLQFEYNEEIPKRIKKADNSACNKGKVYDMELGEEFYLDQNKKESRQIAPELSDLVIYCQAVKFPGLSTLNASGSSRGKERKSRKSIFGNNPGRMSPGETASFNKTSGKSSCEGIRQTWEESSSPLNPTTSLSAIIRTPKCYHISSLNENAAKRLCRRYSQKLTQHTACQLLRTYPAATRIDSSNPNPLMFWLHGIQLVALNYQTDDLPLHLNAAMFEANGGCGYVLKPPVLWDKNCPMYQKFSPLERDLDSMDPAVYSLTIVSGQNVCPSNSMGSPCIEVDVLGMPLDSCHFRTKPIHRNTLNPMWNEQFLFHVHFEDLVFLRFAVVENNSSAVTAQRIIPLKALKRGYRHLQLRNLHNEVLEISSLFINSRRMEENSSGNTMSASSMFNTEERKCLQTHRVTVHGVPGPEPFTVFTINGGTKAKQLLQQILTNEQDIKPVTTDYFLMEEKYFISKEKNECRKQPFQRAIGPEEEIMQILSSWFPEEGYMGRIVLKTQQENLEEKNIVQDDKEVILSSEEESFFVQVHDVSPEQPRTVIKAPRVSTAQDVIQQTLCKAKYSYSILSNPNPSDYVLLEEVVKDTTNKKTTTPKSSQRVLLDQECVFQAQSKWKGAGKFILKLKEQVQASREDKKKGISFASELKKLTKSTKQPRGLTSPSQLLTSESIQTKEEKPVGGLSSSDTMDYRQ

SEQ ID NO: 100462 - protein, 212 aa, Homo sapiens
  MOD_RES (1)..(1): Any amino acid
XDSSLEICVESLSSLLKHEDHQVSDGALRCFASLADRFTRRGVDPAPLAKHGLTEELLSRMAAAGGTVSGPSSACKPGRSTTGAPSTTADSKLSNQVSTIVSLLSTLCRGSPVVTHDLLRSELPDSIESALQGDERCVLDTMRLVDLLLVLLFEGRKALPKSSAGSTGRIPGLRRLDSSGERSHRQLIDCIRSKDTDALIDAIDTGGQKIFF

SEQ ID NO: 100463 - protein, 86 aa, Homo sapiens
MCLHPSSTPPFHQPRKEAVICKQRVPLKKFKSIRETMKEKGLLGEFLRTHKYDPAWKYRFGDLSVTYEPMAYMDAAYFGEISIGTP

SEQ ID NO: 100464 - protein, 96 aa, Homo sapiens
  MOD_RES (1)..(1): Any amino acid
XDEDTIFFVCDTHRPVNVVNVYNDTQIKLLIKQDDDLEVPAYEDIFRDEEEDEEHSGNDSDGSEPSEKRTRLEEEIVEQTMRRRQRREWEARRIIY

SEQ ID NO: 100465 - protein, 123 aa, Homo sapiens
MKDWQEIIALYEKDNTYLVELSSLLVRNVNYEIPSLKKQIAKCQQLQQEYSRKEEECQAGAAEMREQFYHSCKQYGITGENVRGELLALVKDLPSQLAEIGAAAQQSLGEAIDVYQASVGFVC

SEQ ID NO: 100466 - protein, 1603 aa, Homo sapiens
MEKKLLIKSKELQDSQDKCHKMEQEMTRLHRRVSEVEAVLSQKEVELKASETQRSLLEQDLATYITECSSLKRSLEQARMEVSQEDDKALQLLHDIREQSRKLQEIKEQEYQAQVEEMRLMMNQLEEDLVSARRRSDLYESELRESRLAAEEFKRKATECQHKLLKAKDQGKPEVGEYAKLEKINAEQQLKIQELQEKLEKAVKASTEATELLQNIRQAKERAERELEKLQNREDSSEGIRKKLVEAEERRHSLENKVKRLETMERRENRLKDDIQTKSQQIQQMADKILELEEKHREAQVSAQHLEVHLKQKEQHYEEKIKVLDNQIKKDLADKETLENMMQRHEEEAHEKGKILSEQKAMINAMDSKIRSLEQRIVELSEANKLAANSSLFTQRNMKAQEEMISELRQQKFYLETQAGKLEAQNRKLEEQLEKISHQDHSDKNRLLELETRLREVSLEHEEQKLELKRQLTELQLSLQERESQLTALQAARAALESQLRQAKTELEETTAEAEEEIQALTAHRDEIQRKFDALRNSCTVITDLEEQLNQLTEDNAELNNQNFYLSKQLDEASGANDEIVQLRSEVDHLRREITEREMQLTSQKQTMEALKTTCTMLEEQVMDLEALNDELLEKERQWEAWRSVLGDEKSQFECRVRELQRMLDTEKQSRARADQRITESRQVVELAVKEHKAEILALQQALKEQKLKAESLSDKLNDLEKKHAMLEMNARSLQQKLETERELKQRLLEEQAKLQQQMDLQKNHIFRLTQGLQEALDRADLLKTERSDLEYQLENIQVLYSHEKVKMEGTISQQTKLIDFLQAKMDQPAKKKKYNELKLALEKEKARCAELEEALQKTRIELRSAREEAAHRKATDHPHPSTPATARQQIAMSAIVRSPEHQPSAMSLLAPPSSRRKESSTPEEFSRRLKERMHHNIPHRFNVGLNMRATKCAVCLDTVHFGRQASKCLECQVMCHPKCSTCLPATCGLPAEYATHFTEAFCRDKMNSPGLQTKEPSSSLHLEGWMKVPRNNKRGQQGWDRKYIVLEGSKVLIYDNEAREAGQRPVEEFELCLPDGDVSIHGAVGASELANTAKADVPYILKMESHPHTTCWPGRTLYLLAPSFPDKQRWVTALESVVAGGRVSREKAEADAKLLGNSLLKLEGDDRLDMNCTLPFSDQVVLVGTEEGLYALNVLKNSLTHVPGIGAVFQIYIIKDLEKLLMIAGEERALCLVDVKKVKQSLAQSHLPAQPDISPNIFEAVKGCHLFGAGKIENGLCICAAMPSKVVILRYNENLSKYCIRKEIETSEPCSCIHFTNYSILIGTNKFYEIDMKQYTLEEFLDKNDHSLAPAVFAASSNSFPVSIVQVNSAGQREEYLLCFHEFGVFVDSYGRRSRTDDLKWSRLPLAFAYREPYLFVTHFNSLEVIEIQARSSAGTPARAYLDIPNPRYLGPAISSGAIYLASSYQDKLRVICCKGNLVKESGTEHHRGPSTSRSPNKRGPPTYNEHITKRVASSPAPPEGPSHPREPSTPHRYREGRTELRRDKSPGRPLEREKSPGRMLSTRRERSPGRLFEDSSRGRLPAGAVRTPLSQVNKVWDQSSV

SEQ ID NO: 100467 - protein, 62 aa, Homo sapiens
  MOD_RES (1)..(1): Any amino acid
XALSLIATARPPAFITTIAKEQAYENSNTLKVFTLFTCTQTYGSCSKYPITAEYAHNNSCTS

SEQ ID NO: 100468 - protein, 119 aa, Homo sapiens
DDGQGMGRGSRPYRNRGHGRRGPGYTSGTNSEASNASETESDHRDELSDWSLAPTEEERESFLRRGDGRRRGGGGRGQGGRGRGGGFKGNDDHSRTDNRPRNPREAKGRTTDGSLQKKT

SEQ ID NO: 100469 - protein, 108 aa, Homo sapiens
VLGTPTREQIREMNPNYTEFKFPQIKAHPWTKMLILETVDRPIMLLLHQLPTPPEQSRAASCTGKTTSYLSVTQQHWSRLERILKREKNPVHFSVQFFYYYCCSYLTL

SEQ ID NO: 100470 - protein, 86 aa, Homo sapiens
MALRGVSVRLLSRGPGLHVLRTWVSSAAQTEKGGRTQSQLAKCKDLWSHRVSAAPVQLSVCRRWTLSQNPRAARAGWQGRGQGQRH

SEQ ID NO: 100471 - protein, 150 aa, Homo sapiens
MEEPEEPADSGQSLVPVYIYSPEYVSMCDSLAKIPKRASMVHSLIEAYALHKQMRIVKPKVASMEEMATFHTDAYLQHLQKVSQEGDDDHPDSIEYGLGYDCPATEGIFDYAAAIGGATITAAQCLIDGMCKVAINWSGGWHHAKNSSST

SEQ ID NO: 100472 - protein, 180 aa, Homo sapiens
MPLVKRNIDPRHLCHTALPRGIKNELECVTNISLANIIRQLSSLSKYAEDIFGELFNEAHSFSFRVNSLQERVDRLSVSVTQLDPKEEELSLQDITMRKAFRSSTIQDQQLFDRKTLPIPLQETYDVCEQPPPLNILTPYRDDGKEGLKFYTNPSYFFDLWKEKMLQDTEDKRKEKRKQK

SEQ ID NO: 100473 - protein, 137 aa, Homo sapiens
MDDSDTPTYYLQIEPQDGCHPGDSVERSVTCLPSASDENENQLDGDGHEHLTSSDSAMGKPQVSEQDSLNNNESCTLSCEVAAGENLQNTLCEASRDEQAFLGKDKKIPGKRSPRSKKGTAKKIPPDSRILFPGGGL

SEQ ID NO: 100474 - protein, 112 aa, Homo sapiens
MPVAATNSETAMQQVLDNLGSLPSATGAAELDLIFLRGIMESPIVRSLAKAHERLEETKLEAVRDNNLELVQEILRDLAQLAEQSSTAAELAHILQEPHFQSLLETHDSVAS

SEQ ID NO: 100475 - protein, 90 aa, Homo sapiens
  MOD_RES (1)..(1): Any amino acid
XTLVAIDTYNCDLHFKVARDRSSGYPLTIEGFAYLWSGARASYGVRRGRVCFEMKINEEISVKHLPSTEPDPHVVRIGWSLDSCSTQLGF

SEQ ID NO: 100476 - protein, 42 aa, Homo sapiens
MSSLIRRVISTAKAPGAIGPYRTDRHGPFKWTACVRRGSRRS

SEQ ID NO: 100477 - protein, 697 aa, Homo sapiens
MGRTGEHQANSPPVIVNTDTLEAPGYVNGTEGEMEYEEITLERGNSGLGFSIAGGTDNPHIGDDPSIFITKIIPGGAAAQDGRLRVNDSILFVNEVDVREVTHSAAVEALKEAGSIVRLYVMRRKPPAEKVMEIKLIKGPKGLGFSIAGGVGNQHIPGDNSIYVTKIIEGGAAHKDGRLQIGDKILAVNSVGLEDVMHEDAVAALKNTYDVVYLKVAKPSNAYLSDSYAPPDITTSYSQHLDNEISHSSYLGTDYPTAMTPTSPRRYSPVAKDLLGEEDIPREPRRIVIHRGSTGLGFNIVGGEDGEGIFISFILAGGPADLSGELRKGDQILSVNGVDLRNASHEQAAIALKNAGQTVTIIAQYKPEEYSRFEAKIHDLREQLMNSSLGSGTASLRSNPKRGFYIRALFDYDKTKDCGFLSQALSFRFGDVLHVIDASDEEWWQARRVHSDSETDDIGFIPSKRRVERREWSRLKAKDWGSSSGSQGREDSVLSYETVTQMEVHYARPIIILGPTKDRANDDLLSEFPDKFGSCVPHTTRPKREYEIDGRDYHFVSSREKMEKDIQAHKFIEAGQYNSHLYGTSVQSVREVAEQGKHCILDVSANAVRRLQAAHLHPIAIFIRPRSLENVLEINKRITEEQARKAFDRATKLEQEFTECFSAIVEGDSFEEIYHKVKRVIEDLSGPYIWVPARERL

SEQ ID NO: 100478 - protein, 66 aa, Homo sapiens
MIGLNFNLRELLTKFEKDIQAEIDAHNDIFKSIDGNRQKMVKALGNSEEATMLQHRLDDMNQRWND

SEQ ID NO: 100479 - protein, 665 aa, Homo sapiens
MISASRAAAARLVGAAASRGPTAARHQDSWNGLSHEAFRLVSRRDYASEAIKGAVVGIDLGTTNSCVAVMEGKQAKVLENAEGARTTPSVVAFTADGERLVGMPAKRQAVTNPNNTFYATKRLIGRRYDDPEVQKDIKNVPFKIVRASNGDAWVEAHGKLYSPSQIGAFVLMKMKETAENYLGHTAKNAVITVPAYFNDSQRQATKDAGQISGLNVLRVINEPTAAALAYGLDKSEDKVIAVYDLGGGTFDISILEIQKGVFEVKSTNGDTFLGGEDFDQALLRHIVKEFKRETGVDLTKDNMALQRVREAAEKAKCELSSSVQTDINLPYLTMDSSGPKHLNMKLTRAQFEGIVTDLIRRTIAPCQKAMQDAEVSKSDIGEVILVGGMTRMPKVQQTVQDLFGRAPSKAVNPDEAVAIGAAIQGGVLAGDVTDVLLLDVTPLSLGIETLGGVFTKLINRNTTIPTKKSQVFSTAADGQTQVEIKVCQGEREMAGDNKLLGQFTLIGIPPAPRGVPQIEVTFDIDANGIVHVSAKDKGTGREQQIVIQSSGGLSKDDIENMVKNAEKYAEEDRRKKERVEAVNMAEGIIHDTETKMEEFKDQLPADECNKLKEEISKMRELLARKDSETGENIRQAASSLQQASLKLFEMAYKKVQGLKWILILT

SEQ ID NO: 100480 - protein, 724 aa, Homo sapiens
MPVRFKGLSEYQRNFLWKKSYLSESCNSSVGRKYPWAGLRSDQLGITKEPSFISKRRVPYHDPQISKSLEWNGAISESNVVASPEPEAPETPKSQEAEQKDVTQERVHSLEASRVPKRTRSHSADSRAEGASDVENNEGVTNHTPVNENVELEHSTKVLSENVDNGLDRLLRKKAGLTVVPSYNALRNSEYQRQFVWKTSKETAPAFAANQVFHNKSQFVPPFKGNSVIHETEYKRNFKGLSPVKEPKLRNDLRENRNLETVSPERKSNKIDDRLKLEAEMELKDLHQPKRKLTPWKHQRLGKVNSEYRAKFLSPAQYLYKAGAWTHVKGNMPNQGSLNAMWYAEVKELREKAEFYRKRVQGTHFSRDHLNQILSDSNCCWDVSSTTSSEGTVSSNIRALDLAGDPTSHKTLQKCPSTEPEEKGNIVEEQPQKNTTEKLGVSAPTIPVRRRLAWDTENTSEDVQKQPGEKEEEDDNEEEGDRKTGKQAFMGEQEKLDVREKSKADKMKEGSDSSVSSEKGGRLPTPKLRELGGIQRTHHDLTTPAVGGAVLVSPSKMKPPAPEQRKRMTSQDCLETSKNDFTKKESRAVSLLTSPAAGIKTVDPLPLREDSEDNIHKFAEATLPVSKIPKYPTNPPGQLPSPPHVPSYWHPSRRIQGSLRDPEFQHNVGKARMNNLQLPQHEAFNDEDEDRLSEISARSAASSLRAFQTLARAKKRKENFWGKT

SEQ ID NO: 100481 - protein, 145 aa, Homo sapiens
MAGVLKKTTGLVGLAVCNTPHEMRDEGTEMEITCPVHLRSGASVNSSSYVLRLRILYTKILDVLEEIPKNAAYRKYTEQITNEKLAMVKAEPDVKKLEDQLQGGQLEEVILQAEHELNLARKMREWKLWEPLVEEPPADQWKWPI

SEQ ID NO: 100482 - protein, 74 aa, Homo sapiens
MAWQMMQLLLLALVTAAGSAQPRSARARTDLLNVCMNAKHHKTQPSPEDELYGQCSPWKKNACCTASTSQELHK

SEQ ID NO: 100483 - protein, 191 aa, Homo sapiens
MPRSLWLGCSSLADSMPSLRCLYNPGTGALTAFQNSSEREDCNNGEPPRKIIPEKNSLRQTYNSCARLCLNQETVCLASTAMKTENCVAKTKLANGTSSMIVPKQRKLSASYEKEKELCVKYFEQWSESDQVEFVEHLISQMCHYQHGHINSYLKPMLQRDFITALPARGLDHIAENILSYLDAKSLCAAE

SEQ ID NO: 100484 - protein, 1028 aa, Homo sapiens
MGVAGRNRPGAAWAVLLLLLLLPPLLLLAGAVPPGRGRAAGPQEDVDECAQGLDDCHADALCQNTPTSYKCSCKPGYQGEGRQCEDIDECGNELNGGCVHDCLNIPGNYRCTCFDGFMLAHDGHNCLDVDECLENNGGCQHTCVNVMGSYECCCKEGFFLSDNQHTCIHRSEEGLSCMNKDHGCSHICKEAPRGSVACECRPGFELAKNQRDCILTCNHGNGGCQHSCDDTADGPECSCHPQYKMHTDGRSCLEREDTVLEVTESNTTSVVDGDKRVKRRLLMETCAVNNGGCDRTCKDTSTGVHCSCPVGFTLQLDGKTCKDIDECQTRNGGCDHFCKNIVGSFDCGCKKGFKLLTDEKSCQDVDECSLDRTCDHSCINHPGTFACACNRGYTLYGFTHCGDTNECSINNGGCQQVCVNTVGSYECQCHPGYKLHWNKKDCVEVKGLLPTSVSPRVSLHCGKSGGGDGCFLRCHSGIHLSSGLQGAYSVTCGSSSPLRNKQQKSNDSAFGDVTTIRTSVTFKLNEGKCSLKNAELFPEGLRPALPEKHSSVKESFRYVNLTCSSGKQVPGAPGRPSTPKEMFITVEFELETNQKEVTASCDLSCIVKRTEKRLRKAIRTLRKAVHREQFHLQLSGMNLDVAKKPPRTSERQAESCGVGQGHAENQCVSCRAGTYYDGARERCILCPNGTFQNEEGQMTCEPCPRPGNSGALKTPEAWNMSECGGLCQPGEYSADGFAPCQLCALGTFQPEAGRTSCFPCGGGLATKHQGATSFQDCETRVQCSPGHFYNTTTHRCIRCPVGTYQPEFGKNNCVSCPGNTTTDFDGSTNITQCKNRRCGGELGDFTGYIESPNYPGNYPANTECTWTINPPPKRRILIVVPEIFLPIEDDCGDYLVMRKTSSSNSVTTYETCQTYERPIAFTSRSKKLWIQFKSNEGNSARGFQVPYVTYDEDYQELIEDIVRDGRLYASENHQEILKDKKLIKALFDVLAHPQNYFKYTAQESREMFPRSFIRLLRSKVSRFLRPYK

SEQ ID NO: 100485 - protein, 532 aa, Homo sapiens
MYRYLGEALLLSRAGPAALGSASADSAALLGWARGQPAAAPQPGLALAARRHYSEAVADREDDPNFFKMVEGFFDRGASIVEDKLVEDLRTRESEEQKRNRVRGILRIIKPCNHVLSLSFPIRRDDGSWEVIEGYRAQHSQHRTPCKGGIRYSTDVSVDEVKALASLMTYKCAVVDVPFGGAKAGVKINPKNYTDNELEKITRRFTMELAKKGFIGPGIDVPAPDMSTGEREMSWIADTYASTIGHYDINAHACVTGKPISQGGIHGRISATGRGVFHGIENFINEASYMSILGMTPGFGDKTFVVQGFGNVGLHSMRYLHRFGAKCIAVGESDGSIWNPDGIDPKELEDFKLQHGSILGFPKAKPYEGSILEADCDILIPAASEKQLTKSNAPRVKAKIIAEGANGPTTPEADKIFLERNIMVIPDLYLNAGGVTVSYFEWLKNLNHVSYGRLTFKYERDSNYHLLMSVQESLERKFGKHGGTIPIVPTAEFQDRISGASEKDIVHSGLAYTMERSARVCVQMLFAFQLVT

SEQ ID NO: 100486 - protein, 190 aa, Homo sapiens
  MOD_RES (1)..(1): Any amino acid
XVGSTPTGYGTLTIGTSIDPLSSSVSSVRLSGYCGSPWRVIGYHVVVWMMAGIPLLLFRWKPLWGVRLRLRPCNLAHAETLVIEIRDKEDSSWQLFTVQVQTEAIGEGSLEPSPQSQAEDGRSQAAVGAVPEGAWKDTAQLHKSEEARVLRYYLFQGQRYIWIETQQAFYQVSLLDHGRSCDDVHRSRHG

SEQ ID NO: 100487 - protein, 422 aa, Homo sapiens
MAPYSLLVTRLQKALGVRQYHVASVLCQRAKVAMSHFEPNEYIHYDLLEKNINIVRKRLNRPLTLSEKIVYGHLDDPASQEIERGKSYLRLRPDRVAMQDATAQMAMLQFISSGLSKVAVPSTIHCDHLIEAQVGGEKDLRRAKDINQEVYNFLATAGAKYGVGFWKPGSGIIHQIILENYAYPGVLLIGTDSHTPNGGGLGGICIGVGGADAVDVMAGIPWELKCPKVIGVKLTGSLSGWSSPKDVILKVAGILTVKGGTGAIVEYHGPGVDSISCTGMATICNMGAEIGATTSVFPYNHRMKKYLSKTGREDIANLADEFKDHLVPDPGCHYDQLIEINLSELKPHINGPFTPDLAHPVAEVGKVAEKEGWPLDIRVDALACQSLASAAAGYSVAVKSMEPGARWPGLESWLCHLTATNS

SEQ ID NO: 100488 - protein, 122 aa, Homo sapiens
MRPDICLYGTQQHHIQGFSHSAFTFGIESHISQSNINGALVPPAALISIIQKGLQYVEAEVSINEDGTLFDGRPIESLSLIDAVMPDVVQTRQQAYRDKLAQQQAAAAAAAAAAASQQGSAK

SEQ ID NO: 100489 - protein, 154 aa, Homo sapiens
MPAMRGLLAPQNTFLDTIATRFDGTHSNFVLGNAQVAGLFPVVYCSDGFCDLTGFSRAEVMQRGCACSFLYGPDTSELVRQQIRKALDEHKEFKAELILYRKSGLPFWCLLDVIPIKNEKGEVALFLVSHKDISETKNRGGPDRWKETAPGLLL

SEQ ID NO: 100490 - protein, 1961 aa, Homo sapiens
QMRQKSKQQAKIEATQKLEQVKNEQQQQQQQQFGSQHLLVQSGSDTPSSGIQSPLTPQPGNGNMSPAQSFHKELFTKQPPSTPTSTSSDDVFVKPQAPPPPPAPSRIPIQDSLSQAQTSQPPSPQVFSPGSSNSRPPSPMDPYAKMVGTPRPPPVGHSFSRRNSAAPVENCTPLSSVSRPLQMNETTANRPSPVRDLCSSSTTNNDPYAKPPDTPRPVMTDQFPKSLGLSRSPVVSEQTAKGPIAAGTSDHFTKPSPRADVFQRQRIPDSYARPLLTPAPLDSGPGPFKTPMQPPPSSQDPYGSVSQASRRLSVDPYERPALTPRPIDNFSHNQSNDPYSQPPLTPHPAVNESFAHPSRAFSQPGTISRPTSQDPYSQPPGTPRPVVDSYSQSSGTARSNTDPYSQPPGTPRPTTVDPYSQQPQTPRPSTQTDLFVTPVTNQRHSDPYAHPPGTPRPGISVPYSQPPATPRPRISEGFTRSSMTRPVLMPNQDPFLQAAQNRGPALPGPLVRPPDTCSQTPRPPGPGLSDTFSRVSPSAARDPYDQSPMTPRSQSDSFGTSQTAHDVADQPRPGSEGSFCASSNSPMHSQGQQFSGVSQLPGPVPTSGVTDTQNTVNMAQADTEKLRQRQKLREIILQQQQQKKIAGRQEKGSQDSPAVPHPGPLQHWQPENVNQAFTRPPPPYPGNIRSPVAPPLGPRYAVFPKDQRGPYPPDVASMGMRPHGFRFGFPGGSHGTMPSQERFLVPPQQIQGSGVSPQLRRSVSVDMPRPLNNSQMNNPVGLPQHFSPQSLPVQQHNILGQAYIELRHRAPDGRQRLPFSAPPGSVVEASSNLRHGNFIPRPDFPGPRHTDPMRRPPQGLPNQLPVHPDLEQVPPSQQEQGHSVHSSSMVMRTLNHPLGGEFSEAPLSTSVPSETTSDNLQITTQPSDGLEEKLDSDDPSVKELDVKDLEGVEVKDLDDEDLENLNLDTEDGKVVELDTLDNLETNDPNLDDLLRSGEFDIIAYTDPELDMGDKKSMFNEELDLPIDDKLDNQCVSVEPKKKEQENKTLVLSDKHSPQKKSTVTNEVKTEVLSPNSKVESKCETEKNDENKDNVDTPCSQASAHSDLNDGEKTSLHPCDPDLFEKRTNRETAGPSANVIQASTQLPAQDVINSCGITGSTPVLSSLLANEKSDNSDIRPSGSPPPPTLPASPSNHVSSLPPFIAPPGRVLDNAMNSNVTVVSRVNHVFSQGVQVNPGLIPGQSTVNHSLGTGKPATQTGPQTSQSGTSSMSGPQQLMIPQTLAQQNRERPLLLEEQPLLLQDLLDQERQEQQQQRQMQAMIRQRSEPFFPNIDFDAITDPIMKAKMVALKGINKVMAQNNLGMPPMVMSRFPFMGQVVTGTQNSEGQNLGPQAIPQDGSITHQISRPNPPNFGPGFVNDSQRKQYEEWLQETQQLLQMQQKYLEEQIGAHRKSKKALSAKQRTAKKAGREFPEEDAEQLKHVTEQQSMVQKQLEQIRKQQKEHAELIEDYRIKQQQQCAMAPPTMMPSVQPQPPLIPGPLQQSPQHQQQMGQVLQQQNIQQGSINSPSTQTFMQTNERRQVGPPSFVPDSPSIPVGSPNFSSVKQGHGNLSGTSFQQSPVRPSFTPALPAAPPVANSSLPCGQDSTITHGHSYPGSTQSLIQLYSDIIPEEKGKKKRTRKKKRDDDAESTKAPSTPHSDITAPPTPGISETTSTPAVSTPSELPQQADQESVEPVGPSTPNMAAGQLCTELENKLPNSDFSQATPNQQTYANSEVDKLSMETPAKTEEIKLEKAETESCPGQEEPKLEEQNGSKVEGNAVACPVSSAQSPPHSAGAPAAKGDSGNELLKHLLKNKKSSSLLNQKPEGSICSEDDCTKDNKLVEKQNPAEGLQTLGAQMQGGFGCGNQLPKTDGGSETKKQRSKRTQRTGEKAAPRSKKRKKDEEEKQAMYSSTDTFTHLKQ

SEQ ID NO: 100491 - protein, 112 aa, Homo sapiens
MGILEKISEIEKEIARTQKNKATEYHLGLLKAKLAKYRAQLLEPSKSASSKGEGFDVMKSGDARVALIGFPSVGKSTFLSLMTSTASEAASYEFTTLTCIPGVIEEKAVAGR

SEQ ID NO: 100492 - protein, 123 aa, Homo sapiens
  MOD_RES (1)..(1): Any amino acid
XVADGIFKAELNEFLTRELAEDGYSGVEVRVTPTRTEIIILATRTQNVLGEKGRRIRELTAVVQKRFGFPEGSVELYAEKVATRGLCAIAQAESLRYKLLGGLAVRRCAGHQGEDHAALGPNW

SEQ ID NO: 100493 - protein, 234 aa, Homo sapiens
  MOD_RES (1)..(1): Any amino acid
XPDRPASQRMWRIDYSAAVIYDFLAVDDINGDRIQDVLFLYKNTNSSNNFSRSCVDEGFSSPCTFAAAVSGANGSTLWERPVAQDVALVECAVPQPRGSEAPSACILVGRPSSFIAVNLFTGAVRCHLPWGSREEERLGPRLLLGCQWWQCPGRAQNMNQHSARQGRSGPVSAPKPEGAGLRAPAEPASWKDEGKNAWCTGPCVCVGSLHLIAVWKISVPRFGECSYFPYKLSF

SEQ ID NO: 100494 - protein, 61 aa, Homo sapiens
MAERQEEQRGSPPLRAEGKADAEVKLILYHWTHSFSSQKVRLVIAEKALKCEEHDNTQVNA

SEQ ID NO: 100495 - protein, 962 aa, Homo sapiens
MESGQPARRIAMAPLLEYERQLVLELLDTDGLVVCARGLGADRLLYHFLQLHCHPACLVLVLNTQPAEEEYFINQLKIEGVEHLPRRVTNEITSNSRYEVYTQGGVIFATSRILVVDFLTDRIPSDLITEILPLTCQKHPTPGPVPSLSPQPGSLELSWPRWSQGSIQPLFRYHLGILVYRAHRIIESCQEAFILRLFRQKNKRGFIKAFTDNAVAFDTGFCHVERVMRNLFVRKLYLWPRFHVAVNSFLEQHKPEVVEIHVSMTPTMLAIQTAILDILNACLKELKCHNPSLEVEDLSLENAIGKPFDKTIRHYLDPLWHQLGAKTKSLVQDLKILRTLLQYLSQYDCVTFLNLLESLRATEKAFGQNSGWLFLDSSTSMFINARARVYHLPDAKMSKKEKISEKMEIKEGEETKKELVLESNPKWEALTEVLKEIEAENKESEALGGPGQVLICASDDRTCSQLRDYITLGAEAFLLRLYRKTFEKDSKAEEVWMKFRKEDSSKRIRKSHKRPKDPQNKERASTKERTLKKKKRKLTLTQMVGKPEELEEEGDVEEGYRREISSSPESCPEEIKHEEFDVNLSSDAAFGILKEPLTIIHPLLGCSDPYALTRVLHEVEPRYVVLYDAELTFVRQLEIYRASRPGKPLRVYFLIYGGSTEEQRYLTALRKEKEAFEKLIREKASMVVPEEREGRDETNLDLVRGTASADVSTDTRKAGGQEQNGTQQSIVVDMREFRSELPSLIHRRGIDIEPVTLEVGDYILTPEMCVERKSISDLIGSLNNGRLYSQCISMSRYYKRPVLLIEFDPSKPFSLTSRGALFQEISSNDISSKLTLLTLHFPRLRILWCPSPHATAELFEELKQSKPQPDAATALAITADSETLPESEKYNPGPQDFLLKMPGVNAKNCRSLMHHVKNIAELAALSQDELTSILGNAANAKQLYDFIHTSFAEVVSKGKGKK

SEQ ID NO: 100496 - protein, 78 aa, Homo sapiens
  MOD_RES (1)..(1): Any amino acid
XRLERMARFRCGQGLWVGPVGTWVPFLSLLPSLWHSAQMVIGWLLDIERMALGSTKSLQVPRGLRVRHWMWQCPPWPG

SEQ ID NO: 100497 - protein, 79 aa, Homo sapiens
MERVKMINVQRLLEAAEFLERRERECEHGYASSFPSMPSPRLQHSKPPRRLSRAQKHSSGSSNTSTANRSTHNELEKNR

SEQ ID NO: 100498 - protein, 570 aa, Homo sapiens
MLVPLAKLSCLAYQCFHALKIKKNYLPLCATRWSSTSTVPRITTHYTIYPRDKDKRWEGVNMERFAEEADVVIVGAGPAGLSAAVRLKQLAVAHEKDIRVCLVEKAAQIGAHTLSGACLDPGAFKELFPDWKEKGAPLNTPVTEDRFGILTEKYRIPVPILPGLPMNNHGNYIVRLGHLVSWMGEQAEALGVEVYPGYAAAEVLFHDDGSVKGIATNDVGIQKDGAPKATFERGLELHAKVTIFAEGCHGHLAKQLYKKFDLRANCEPQTYGIGLKEVGLDYQNPYLSPFREFQRWKHHPSIRPTLEGGKRIAYGARALNEGGFQSIPKLTFPGGLLIGCSPGFMNVPKIKGTHTAMKSGILAAESIFNQLTSENLQSKTIGLHVTEYEDNLKNSWVWKELYSVRNIRPSCHGVLGVYGGMIYTGIFYWILRGMEPWTLKHKGSDFERLKPAKDCTPIEYPKPDGQISFDLLSSVALSGTNHEHDQPAHLTLRDDSIPVNRNLSIYDGPEQRFCPAGVYEFVPVEQGDGFRLQINAQNCVHCKTCDIKDPSQNINWVVPEGGGGPAYNGM

SEQ ID NO: 100499 - protein, 242 aa, Homo sapiens
MASGTTTTAVKIGIIGGTGLDDPEILEGRTEKYVDTPFGKPSDALILGKIKNVDCVLLARHGRQHTIMPSKVNYQANIWALKEEGCTHVIVTTACGSLREEIQPGDIVIIDQFIDRTTMRPQSFYDGSHSCARGVCHIPMAEPFCPKTREVLIETAKKLGLRCHSKGTMVTIEGPRFSSRAESFMFRTWGADVINMTTVPEVVLAKEAGICYASIAMATDYDCWKEHEEACYCFSRFRWTGS

SEQ ID NO: 100500 - protein, 52 aa, Homo sapiens
MANTTGEPEEVSGALSPPSASAYVKLVLLGLIMCVSLAGNAILSLLVLKERA

SEQ ID NO: 100501 - protein, 183 aa, Homo sapiens
MQELHLLWWALLLGLAQACPEPCDCGEKYGFQIADCAYRDLESVPPGFPANVTTLSLSANRLPGLPEGAFREVPLLQSLWLAHNEIRTVAAGALASLSHLKSLDLSHNLISDFAWSDLHNLSALQLLKMDSNELTFIPRDAFRSLRALRSLQLNHNRLHTLAEGTFTPLTALSHLQINENPFD

SEQ ID NO: 100502 - protein, 149 aa, Homo sapiens
  MOD_RES (1)..(1): Any amino acid
XGAGEPPATPAGLGSGGDRVCFNLGRELYFYPGCCRRGSQRSIDLNKPIDKRIYKGTQPTCHDFNQFTAATETISLLVGFSAGQVQYLDLIKKDTSKLFNEEVIAAPRAPNFSAFSPTHYMPLGCSCLRNSVGLRGAGPGRDGEWGDSS

SEQ ID NO: 100503 - protein, 55 aa, Homo sapiens
MKDSCITVMAMALLSGFFFFAPASSYNLDVRGARSFSPPRAGRHFGYRVLQVGNG

SEQ ID NO: 100504 - protein, 164 aa, Homo sapiens
MNPIVVVHGGGAGPISKDRKERVHQGMVRAATVGYGILREGGSAVDAVEGAVVALEDDPEFNAGCGSVLNTNGEVEMDASIMDGKDLSAGAVSAVQCIANPIKLARLVMEKTPHCFLTDQGAAQFAAAMGVPEIPGEKLVTERNKKRLEKEKHEKGAQKTDCQK

SEQ ID NO: 100505 - protein, 526 aa, Homo sapiens
  MOD_RES (1)..(1): Any amino acid
XPSEYVANSASALFSQDISVKMASDFLMKLSAANQKEPMNLNFKVKEEPKEGESLSTTLPRSSYVFSPESEVSAPGVSEDALKPQEGKGSVLRRDVSVKAASELLMKLSAESYKETQMVKIKEEPMEVDIQDSHVSISPSRNVGYSTLIGREKTEPLQKMPEGRVPPERNLFSQDISVKMASELLFQLSEKVSKEHNHTKENTIRTTTSPFFSEDTFRQSPFTSNSKELLPSDSVLHGRISAPETEKIVLEAGNGLPSWKFNDQLFPCDVCGKVFGRQQTLSRHLSLHTEERKYKCHLCPYAAKCRANLNQHLTVHSVKLVSTDTEDIVSAVTSEGSDGKKHPYYYSCHVCGFETELNVQFVSHMSLHVDKEQWMFSICCTACDFVTMEEAEIKTHIGTKHTGEDRKTPSESNSPSSSSLSALSDSANSKDDSDGSQKNKGGNNLLVISVMPGSQPSLNSEEKPEKGFECVFCNFVCKTKNMFERHLQIHLITRMFECDVCHKFMKTPEQLLEHKKCHTVPTGGLK

SEQ ID NO: 100506 - protein, 274 aa, Homo sapiens
MVVEFRHMRNHAYEPLASFLDFITYSYMIDNVILLITGTLHQRSIAELVPKCHPLGSFEQMEAVNIAQTPAELYNAILVDTPLAAFFQDCISEQDLDEMNIEIIRNTLYKAYLESFYKFCTLLGGTTADAMCPILEFEADRRAFIITINSFGTELSKEDRAKLFPHCGRLYPEGLAQLARADDYEQVKNVADYYPEYKLLFEGAGSNPGDKTLEDRFFEHEVKLNKLAFLNQFHFGVFYAFVKLKEQECRNIVWIAECIAQRHRAKIDNYIPIF

SEQ ID NO: 100507 - protein, 68 aa, Homo sapiens
MDDEEETYRLWKIRKTIMQVSSGSRGSSGEATRAPAEEPVASTHPHSPGAQHLSLCPVWEENSPPLPC

SEQ ID NO: 100508 - protein, 147 aa, Homo sapiens
RPELLCGAVALGCALLLALKFTCSRAKDVIIPAKPPVSFFSLRSPVLDLFQGQLDYAEYVRRDSEVVLLFFYAPWCGQSIAARAEIEQAASRLSDQVLFVAINCWWNQGKCRKQKHFFYFPVIYLYHRSLEYSGTLSSVAHPSLLVI

SEQ ID NO: 100509 - protein, 221 aa, Homo sapiens
MATDITPEAIGFLSAVGVFIVLLAVLFLFINKKLCFETIGGLPFLEHRGKRKHSKDKTGIHKGLVNSFGDDEELSTSSDSDEEVIKQFEISVSRSQSFRSVTSEKGKQTGLEQKPKFSRSLLTHGEDGTEVSACEDLDGASQRRYSENLSYGEDDHIPAHSQSPCERGDAKHHGTSHQESSVVQSLRRQSTEGSLEMETAFNSRGFEDSYATDSSSMWSPE

SEQ ID NO: 100510 - protein, 871 aa, Homo sapiens
MSLFKARDWWSTILGDKEEFDQGCLCLANVDNSGNGQDKIIVGSFMGYLRIFSPHPAKTGDGAQAEDLLLEVDLRDPVLQVEVGKFVSGTEMLHLAVLHSRKLCVYSVSGTLGNVEHGNQCQMKLMYEHNLQRTACNMTYGSFGGVKGRDLICIQSMDGMLMVFEQESYAFGRFLPGFLLPGPLAYSSRTDSFLTVSSCQQVESYKYQVLAFATDADKRQETEQQKLGSGKRLVVDWTLNIGEQALDICIVSFNQSASSVFVLGERNFFCLKDNGQIRFMKKLDWSPSCFLPYCSVSEGTINTLIGNHNNMLHIYQDVTLKWATQLPHIPVAVRVGCLHDLKGVIVTLSDDGHLQCSYLGTDPSLFQAPNVQSRELNYDELDVEMKELQKIIKDVNKSQGVWPMTEREDDLNVSVVVSPNFDSVSQATDVEVGTDLVPSVTVKVTLQNRVILQKAKLSVYVQPPLELTCDQFTFEFMTPDLTRTVSFSVYLKRSYTPSELEGNAVVSYSRPTDRNPDGIPRVIQCKFRLPLKLICLPGQPSKTASHKITIDTNKSPVSLLSLFPGFASQSDDDQVNVMGFHFLGGARITVLASKTSQRYRIQSEQFEDLWLITNELILRLQEYFEKQGVKDFACSFSGSIPLQEYFELIDHHFELRINGEKLEELLSERAVQFRAIQRRLLARFKDKTPAPLQHLDTLLDGTYKQVIALADAVEENQGNLFQSFTRLKSATHLVILLIALWQKLSADQVAILEAAFLPLQEDTQELGWEETVDAAISHLLKTCLSKSSKEQALNLNSQLNIPKDTSQLKKHITLLCDRLSKGGRLCLSTDAAAPQTMVMPDPRTGQRIEAWTLRIPHSLSQHLQLMEGPKS

SEQ ID NO: 100511 - protein, 55 aa, Homo sapiens
GYLKKENMAALCRTAESQNPMQVFQGFMSFKDVAVNFTRKNGENWTLLRESCTGM

SEQ ID NO: 100512 - protein, 43 aa, Homo sapiens
YTQDFTVPGGEEASEAGLRAERGLQKSEGSDLSGEEASRPAPQ

SEQ ID NO: 100513 - protein, 588 aa, Homo sapiens
MEPPDAPAQARGAPRLLLLAVLLAAHPDAQAEVRLSVPPLVEVMRGKSVILDCTPTGTHDHYMLEWFLTDRSGARPRLASAEMQGSELQVTMHDTRGRSPPYQLDSQGRLVLAEAQVGDERDYVCVVRAGAAGTAEATARLNVFAKPEATEVSPNKGTLSVMEDSAQEIATCNSRNGNPAPKITWYRNGQRLEVPVEMNPEGYMTSRTVREASGLLSLTSTLYLRLRKDDRDASFHCAAHYSLPEGRHGRLDSPTFHLTLHYPTEHVQFWVGSPSTPAGWVREGDTVQLLCRGDGSPSPEYTLFRLQDEQEEVLNVNLEGNLTLEGVTRGQSGTYGCRVEDYDAADDVQLSKTLELRVAYLDPLELSEGKVLSLPLNSSAVVNCSVHGLPTPALRWTKDSTPLGDGPMLSLSSITFDSNGTYVCEASLPTVPVLSRTQNFTLLVQGSPELKTAEIEPKADGSWREGDEVTLICSARGHPDPKLSWSQLGGSPAEPIPGRQGWVSSSLTLKVTSALSRDGISCEASNPHGNKRHVFHFGTVSPQTSQAGVAVMAVAVSVGLLLLVVAVFYCVRRKGGPCCRQRREKGAP

SEQ ID NO: 100514 - protein, 91 aa, Homo sapiens
MPLPEPSEQEGESVKASQEPSPKPGTEVIPAAPRKPRKFSKLVLLTASKDSTKVAGAKRKGVHCVMSLGVPGPATLAKALLQTHPEAQRAI

SEQ ID NO: 100515 - protein, 306 aa, Homo sapiens
MMDLRNTPAKSLDKFIEDYLLPDTCFRMQINHAIDIICGFLKERCFRGSSYPVCVSKVVKGGSSGKGTTLRGRSDADLVVFLSPLTTFQDQLNRRGEFIQEIRRQLEACQRERAFSVKFEVQAPRWGNPRALSFVLSSLQLGEGVEFDVLPAFDALGQLTGGYKPNPQIYVKLIEECTDLQKEGEFSTCFTELQRDFLKQRPTKLKSLIRLVKHWYQNCKKKLGKLPPQYALELLTVYAWERGSMKTHFNTAQGFRTVLELVINYQQLCIYWTKYYDFKNPIIEKYLRRQLTKPRYAIPTWLSSPM

SEQ ID NO: 100516 - protein, 195 aa, Homo sapiens
  MOD_RES (1)..(1): Any amino acid
XPTVLTDVDPKTKVMQEEIFGPILPIVPVKNVDEAINFINEREKPLALYVFSHNHKLIKRMIDETSSGGVTGNDVIMHFTLNSFPFGGVGSSGMGAYHGKHSFDTFSHQRPCLLKSLKREGANKLRYPPNSQSKVDWGKFFLLKRFNKEKLGLLLLTFLGIVAAVLVKKYQAVLRRKALLIFLVVHRLRWSSKQR

SEQ ID NO: 100517 - protein, 598 aa, Homo sapiens
MIDSGEKKPGRRAEEAVTFKDVAVIFTEEELGLLDPAQRKLYRDVMLENFRNLLSVGHQPFHGDTFHFLREEKFWVMGTTSQREGNLGTILLSLELCHSGLCKFPKVGGKMTMSKEAVTFKDVAVVFTEEELGLLDLAQRKLYRDVMLENFRNLLSVGHQPFHRDTFHFLREEKFWMMDIATQREGNSGGKIQPEMKTFPEAGPHEGWSCQQIWEEIASDLTRPQDSTIKSSQFFEQGDAHSQVEEGLSIMHTGQKPSNCGKCKQSFSDMSIFDLPQQIRSAEKSHSCDECGKSFCYISALHIHQRVHLGEKLFKCDVCGKEFSQSLHLQTHQRVHTGEKPFKCEQCGRGFRCRSALTVHCKLHMGEKHYNCEACGRAFIHDFQLQKHQRIHTGEKPFKCEICSVSFRLRSSLNRHCVVHTGKKPNSTGEYGKGFIRRLDLCKHQTIHTGEKPYNCKECGKSFRRSSYLLIHQRVHTGEKPYKCDKCGKSYITKSGLDLHHRAHTGERPYNCDDCGKSFRQASSILNHKRLHCRKKPFKCEDCGKKLVYRSYRKDQQKNHSGENPSKCEDCGKRYKRRLNLDIILSLFLNDTHNSVFS

SEQ ID NO: 100518 - protein, 24 aa, Homo sapiens
FQMEQIPLSYPQGHGFHPLSPPFH

SEQ ID NO: 100519 - protein, 32 aa, Homo sapiens
HERNDGRDPFPLLMNRQRVPKVLVENARVASL

SEQ ID NO: 100520 - protein, 36 aa, Homo sapiens
MYSSSCETTRNTTGIEESTDGMILGPEDLSYQIYDV

SEQ ID NO: 100521 - protein, 64 aa, Homo sapiens
MMCTPSNTPATPPNFPDALAMFSKLRASEGLQSSNSPMTAAACSPPANFSPFWASSPPSHQAPW

SEQ ID NO: 100522 - protein, 82 aa, Homo sapiens
MNAPDEDETINVNYNIMCLSREEGIKWIKKERLPAFLESDCYFEYRLAKLVSQVRWSKSGMNFTVGSNFSPWIVKKPPSLPP

SEQ ID NO: 100523 - protein, 187 aa, Homo sapiens
MNCCIGLGEKARGSHRASYPSLSALFTEASILGFGSFAVKAQVAWKALSLSLRHPFRGTEKPRPLLPVPPPPSVPPTAWNGAVPGRGSRGGGGVACPRPSRLFFASAGVRGVALAARAMPGRSCVALVLLAAAVSCAVAQHAPPWTEDCRKSTYPPSGPTYRGAVPWYTINLDLPPYKRWHELMLDK

SEQ ID NO: 100524 - protein, 1817 aa, Homo sapiens
MTTMLQKSDSNASFLRAARAGNLDKVVEYLKGGIDINTCNQNGLNALHLAAKEGHVGLVQELLGRGSSVDSATKKGNTALHIASLAGQAEVVKVLVKEGANINAQSQNGFTPLYMAAQENHIDVVKYLLENGANQSTATEDGFTPLAVALQQGHNQAVAILLENDTKGKVRLPALHIAARKDDTKSAALLLQNDHNADVQSKSGFTPLHIAAHYGNVNVATLLLNRGAAVDFTARNGITPLHVASKRGNTNMVKLLLDRGGQIDAKTRDGLTPLHCAARSGHDQVVELLLERGAPLLARTKNGLSPLHMAAQGDHVECVKHLLQHKAPVDDVTLDYLTALHVAAHCGHYRVTKLLLDKRANPNARALNGFTPLHIACKKNRIKVMELLVKYGASIQAITESGLTPIHVAAFMGHLNIVLLLLQNGASPDVTNIRGETALHMAARAGQVEVVRCLLRNGALVDARAREEQTPLHIASRLGKTEIVQLLLQHMAHPDAATTNGYTPLHISAREGQVDVASVLLEAGAAHSLATKKGFTPLHVAAKYGSLDVAKLLLQRRAAADSAGKNGLTPLHVAAHYDNQKVALLLLEKGASPHATAKNGYTPLHIAAKKNQMQIASTLLNYGAETNIVTKQGVTPLHLASQEGHTDMVTLLLDKGANIHMSTKSGLTSLHLAAQEDKVNVADILTKHGADQDAHTKLGYTPLIVACHYGNVKMVNFLLKQGANVNAKTKNGYTPLHQAAQQGHTHIINVLLQHGAKPNATTANGNTALAIAKRLGYISVVDTLKVVTEEVTTTTTTITEKHKLNVPETMTEVLDVSDEEGDDTMTGDGGEYLRPEDLKELGDDSLPSSQFLDGMNYLRYSLEGGRSDSLRSFSSDRSHTLSHASYLRDSAVMDDSVVIPSHQVSTLAKEAERNSYRLSWGTENLDNVALSSSPIHSGFLVSFMVDARGGAMRGCRHNGLRIIIPPRKCTAPTRVTCRLVKRHRLATMPPMVEGEGLASRLIEVGPSGAQFLGPVIVEIPHFAALRGKERELVVLRSENGDSWKEHFCDYTEDELNEILNGMDEGGSFLVLVLDSPEDLEKKRICRIITRDFPQYFAVVSRIKQDSNLIGPEGGVLSSTVVPQVQAVFPEGALTKRIRVGLQAQPMHSELVKKILGNKATFSPIVTLEPRRRKFHKPITMTIPVPKASSDVMLNGFGGDAPTLRLLCSITGGTTPAQWEDITGTTPLTFVNECVSFTTNVSARFWLIDCRQIQESVTFASQVYREIICVPYMAKFVVFAKSHDPIEARLRCFCMTDDKVDKTLEQQENFAEVARSRDVEVLEGKPIYVDCFGNLVPLTKSGQHHIFSFFAFKENRLPLFVKVRDTTQEPCGRLSFMKEPKSTRGLVHQAICNLNITLPIYTKESESDQEQEEEIDMTSEKNPQDEQERIEERLAYIADHLGFSWTELARELDFTEEQIHQIRIENPNSLQDQSHALLKYWLERDGKHATDTNLVECLTKINRMDIVHLMETNTEPLQERISHSYAEIEQTITLDHSEGFSVLQEELCTAQHKQKEEQAVSKESETCDHPPIVSEEDISVGYSTFQDGVPKTEGDSSATALFPQTHKEQVQQDFSGKMQDLPEESSLEYQQEYFVTTPGTETSETQKAMIVPSSPSKTPEEVSTPAEEEKLYLQTPTSSERGGSPIIQEPEEPSEHREESSPRKTSLVIVESADNQPETCERLDEDAAFEKGDDMPEIPPETVTEEEYIDEHGHTVVKKVTRKIIRRYVSSEGTEKEEIMVQGMPQEPVNIEEGDGYSKVIKRVVLKSDTEQSEDNNE

SEQ ID NO: 100525 - protein, 115 aa, Homo sapiens
MTDTVFSNSSNRWMYPSDRPLQSNDKEQLQAGWSVHPGGQPDRQRKQEELTDEEKEIINRVIARAEKMEEMEQERIGRLVDRLENMRKNVAGDGVNRCILCGEQLGMLGSACVVC

SEQ ID NO: 100526 - protein, 68 aa, Homo sapiens
  MOD_RES (1)..(1): Any amino acid
XMALFFVLCWIQDEIVLQVFSKVPYDPSFDETRTAVRSITKRDTQKNYVKMSLAPGVVLELQMLADTS

SEQ ID NO: 100527 - protein, 539 aa, Homo sapiens
MPGQRRALSPKMASMRESDTGLWLHNKLGATDELWAPPSIASLLTAAVIDNIRLCFHGLSSAVKLKLLLGTLHLPRRTVDEMKGALMEIIQLASLDSDPWVLMVADILKSFPDTGSLNLELEEQNPNVQDILGELREKVGECEASAMLPLECQYLNKNALTTLAGPLTPPVKHFQLKRKPKSATLRAELLQKSTETAQQLKRSAGVPFHAKGRGLLRKMDTTTPLKGIPKQAPFRSPTAPSVFSPTGNRTPIPPSRTLLRKERGVKLLDISELDMVGAGREAKRRRKTLDAEVVEKPAKEETVVENATPDYAAGLVSTQKLGSLNNEPALPSTSYLPSTPSVVPASSYIPSSETPPAPSSREASRPPEEPSAPSPTLPAQFKQRAPMYNSGLSPATPTPAAPTSPLTPTTPPAVAPTTQTPPVAMVAPQTQAPAQQQPKKNLSLTREQMFAAQEMFKTANKVTRPEKALILGFMAGSRENPCQEQGDVIQIKLSEHTEDLPKADGQGSTTMLVDTVFEMNYATGQWTRFKKYKPMTNVS

SEQ ID NO: 100528 - protein, 59 aa, Homo sapiens
MEDSMDMDMSPLRPQNYLFDYHFKVDNDENEHQLSLRTVSLGAGAKDELHIVEAEAMNY

SEQ ID NO: 100529 - protein, 81 aa, Homo sapiens
  MOD_RES (1)..(1): Any amino acid
XISGDTAFDRDILGSVSEQIRKNFARTHWKRAFNATSFLRHIRKLGQIPEGEGASEQGMARHSHSGGPQGLSFLHGCCVLR

SEQ ID NO: 100530 - protein, 63 aa, Homo sapiens
MALYHTEERGQPCSQNYRLFFKNVTGHYISPFHDIPLKVNSKEDTEAQGIFIDLSKIWKMAFL

SEQ ID NO: 100531 - protein, 97 aa, Homo sapiens
KKHHQEEDAGPTQPSPAKPQLKLKIKLGGQVLGTKSVPTFTVIPEGPRSPSPLMVVDNEEEPMEGVPLEQYRAWLGEDLEMKTVISLPLHFGTYQEG

SEQ ID NO: 100532 - protein, 166 aa, Homo sapiens
MMLGTEGGEGFVVKVRGLPWSCSADEVQRFFSDCKIQNGAQGIRFIYTREGRPSGEAFVELESEDEVKLALKKDRETMGHRYVEGLEIVPNGITLPVDFQGRSTGEAFVQFASQEIAEKALKKHKERIGHRYIEIFKSSRAEVRTHYDPPRKLMAMQRPGPYDRPG

SEQ ID NO: 100533 - protein, 76 aa, Homo sapiens
  MOD_RES (1)..(1): Any amino acid
XVRLHNAIEGGTQLSRALETLTGALFQRPPLIAAVKRQLRVRTIYESKMIEYDPERRLGKCHLLWGQDYASRCSSI

SEQ ID NO: 100534 - protein, 644 aa, Homo sapiens
  MOD_RES (1)..(1): Any amino acid
XAYDEAKERASFITPVPGGVGPMTVAMLMQSTVESAKRFLEKFKPGKWMIQYNNLNLKTPVPSDIDISRSCKPKPIGKLAREIGLLSEEVELYGETKAKVLLSALERLKHRPDGKYVVVTGITPTPLGEGKSTTTIGLVQALGAHLYQNVFACVRQPSQGPTFGIKGGAAGGGYSQVIPMEEFNLHLTGDIHAITAANNLVAAAIDARIFHELTQTDKALFNRLVPSVNGVRRFSDIQIRRLKRLGIEKTDPTTLTDEEINRFARLDIDPETITWQRVLDTNDRFLRKITIGQAPTEKGHTRTAQFDISVASEIMAVLALTTSLEDMRERLGKMVVASSKKGEPVSAEDLGVSGALTVLMKDAIKPNLMQTLEGTPVFVHAGPFANIAHGNSSIIADRIALKLVGPEGFVVTEAGFGADIGMEKFFNIKCRYSGLCPHVVVLVATVRALKMHGGGPTVTAGLPLPKAYIQENLELVEKGFSNLKKQIENARMFGIPVVVAVNAFKTDTESELDLISRLSREHGAFDAVKCTHWAEGGKGALALAQAVQRAAQAPSSFQLLYDLKGFGNLPICMAKTHLSLSHNPEQKGVPTGFILPIRDIRASVGAGFLYPLVGTMSTMPGLPTRPCFYDIDLDPETEQVNGLF

SEQ ID NO: 100535 - protein, 126 aa, Homo sapiens
MKVHMHTKFCLICLLTFIFHHCNHCHEEHDHGPEALHRQHRGMTELEPSKFSKQAAENEKKYYIEKLFERYGENGRLSFFGLEKLLTNLGLGERKVVEINHEDLGHDHVSHLDILAVQEGKHFHSH

SEQ ID NO: 100536 - protein, 120 aa, Homo sapiens
MCHLYEGPVVGGWYKVLDRFIPGTTKVDALKKMLLDQGGFAPCFLGCFLPLVGALNGLSAQDNWAKLQRDYPDALITNYYLWPAVQLANFYLVPLHYRLAVVQCVAVIWNSYLSWKAHRL

SEQ ID NO: 100537 - protein, 96 aa, Homo sapiens
VTVLVMCHTRELAFQISKEYERFSKYMPSVKVSVFFGGLSIKKDEEVLKKNCPHVVVGTPGRILALVRNRSFSLKNVKHFVLDECDKMLEQLGSPP

SEQ ID NO: 100538 - protein, 455 aa, Homo sapiens
MADKRKLQGEIDRCLKKVSEGVEQFEDIWQKLHNAANANQKEKYEADLKKEIKKLQRLRDQIKTWVASNEIKDKRQLIDNRKLIETQMERFKVVERETKTKAYSKEGLGLAQKVDPAQKEKEEVGQWLTNTIDTLNMQVDQFESEVESLSVQTRKKKGDKDQKQDRIEGLKRHIEKHRYHVRMLETILRMLDNDSILVDAIRKIKDDVEYYVDSSQDPDFEENEFLYDDLDLEDIPQALVATSPPSHSHMEDEIFNQSSSTPTSTTSSSPIPPSPANCTTENSEDDKKRGRSTDSEVSQSPAKNGSKPVHSNQHPQSPAVPPTYPSGPPPAASALSTTPGNNGVPAPAAPPSALGPKASPAPSHNSGTPAPYAQAVAPPAPSGPSTTQPRPPSVQPSGGGGGGSGGGGSSSSSNSSAGGGAGKQNGATSYSSVVADSPAEVALSSSGGNNASSQA

SEQ ID NO: 100539 - protein, 255 aa, Homo sapiens
  MOD_RES (1)..(1): Any amino acid
XGMKLGSPKSSVTIWQPLKLFAYSQLTSLVRRATLKENEQIPKYEKIHNFKVHTFRGPHWCEYCANFMWGLIAQGVKCADCGLNVHKQCSKMVPNDCKPDLKHVKKVYSCDLTTLVKAHTTKRPMVVDMCIREIESRGLNSEGLYRVSGFSDLIEDVKMAFDREIMDPDEQLETLHEALKLLPPAHCETLRYLMAHLKRVTLHEKENLMNAENLGIVFGPTLMRSPELDAMAALNDIRYQRLVVELLIKNEDILF

SEQ ID NO: 100540 - protein, 132 aa, Homo sapiens
MEDLCVANTLFALNLFKHLAKASPTQNLFLSPWSISSTMAMVYMGSRGSTEDQMAKVLQFNEVGANAVTPMTPENFTSCGFMQQIQKGSYPDAILQAQAADKIHSSFRSLSSAINASTGNYLLESVNKLFGE

SEQ ID NO: 100541 - protein, 54 aa, Homo sapiens
MVRTDGHTLSEKRNYQPPALSFPIPRVANVERSCTGDKQHVWCFKKEVCRGGRQ

SEQ ID NO: 100542 - protein, 238 aa, Homo sapiens
IMDRWENQGSPQTSLSAPAIPQNLPFPPALHRSSFPDSTEAFDPRKPDPYELYEKSRAIYEKQVPPRTSFRMDSSGPDYKELDVHLRRMESGFGFRILGGDEPGQPILIGAVIAMGSADRDGRLHPGDELVYVDGIPVAGKTHRYVIDLMHHAARNGQVNLTVRRKVLCGGEPCPENGRSPGSVSTHHSSPRSDYATYTNSNHAAPSSNASPPEGFASHSLQTSDVVIHRKENEGFGF

SEQ ID NO: 100543 - protein, 38 aa, Homo sapiens
MESAITLWQFLLQLLLDQKHEHLICWTSNDGEFKLLKA

SEQ ID NO: 100544 - protein, 41 aa, Homo sapiens
MKQPIMADGPRCKRRKQANPRRKNAKTNHLNREINSTSVQH

SEQ ID NO: 100545 - protein, 186 aa, Homo sapiens
MGCVQCKDKEATKLTEERDGSLNQSSGYRYGTDPTPQHYPSFGVTSIPNYNNFHAAGGQGLTVFGGVNSSSHTGTLRTRGGTGVTLFVALYDYEARTEDDLSFHKGEKFQILNSSEGDWWEARSLTTGETGYIPSNYVAPVDSIQAEEWYFGKLGRKDAERQLLSFGNPRGTFLIRESETTKGAYS

SEQ ID NO: 100546 - protein, 127 aa, Homo sapiens
MMRNKDKSQEEDSSLHSNASSHSASEEASGSDSGSQSESEQGSDPGSGHGSESNSSSESSESQSESESESAGSKSQPVLPEAKEKPASKKERIADVKKMWEEYPDVYGVRRSNRSRQEPSRFNIKEE

SEQ ID NO: 100547 - protein, 703 aa, Homo sapiens
MAANMYRVGDYVYFENSSSNPYLIRRIEELNKTANGNVEAKVVCFYRRRDISSTLIALADKHATLSVCYKAGPGADNGEEGEIEEEMENPEMVDLPEKLKHQLRHRELFLSRQLESLPATHIRGKCSVTLLNETESLKSYLEREDFFFYSLVYDPQQKTLLADKGEIRVGNRYQADITDLLKEGEEDGRDQSRLETQVWEAHNPLTDKQIDQFLVVARSVGTFARALDCSSSVRQPSLHMSAAAASRDITLFHAMDTLHKNIYDISKAISALVPQGGPVLCRDEMEEWSASEANLFEEALEKYGKDFTDIQQDFLPWKSLTSIIEYYYMWKTTDRYVQQKRLKAAEAESKLKQVYIPNYNKPNPNQISVNNVKAGVVNGTGAPGQSPGAGRACESCYTTQSYQWYSWGPPNMQCRLCASCWTYWKKYGGLKMPTRLDGERPGPNRSNMSPHGLPARSSGSPKFAMKTRQAFYLHTTKLTRIARRLCREILRPWHAARHPYLPINSAAIKAECTARLPEASQSPLVLKQAVRKPLEAVLRYLETHPRPPKPDPVKSVSSVLSSLTPAKVAPVINNGSPTILGKRSYEQHNGVDGLANHGQARHMGPSRNLLLNGKSYPTKVRLIRGGSLPPVKRRRMNWIDAPDDVFYMATEETRKIRKLLSSSETKRAARRPYKPIALRQSQALPPRPPPPAPVNDEPIVIED

SEQ ID NO: 100548 - protein, 459 aa, Homo sapiens
MSERKEGRGKGKGKKKERGSGKKPESAAGSQSPALPPRLKEMKSQESAAGSKLVLRCETSSEYSSLRFKWFKNGNELNRKNKPQNIKIQKKPGKSELRINKASLADSGEYMCKVISKLGNDSASANITIVESNEIITGMPASTEGAYVSSESPIRISVSTEGANTSSSTSTSTTGTSHLVKCAEKEKTFCVNGGECFMVKDLSNPSRYLCKCPNEFTGDRCQNYVMASFYKAEELYQKRVLTITGICIALLVVGIMCVVAYCKTKKQRKKLHDRLRQSLRSERNNMMNIANGPHHPNPPPENVQLVNQYVSKNVISSEHIVEREAETSFSTSHYTSTAHHSTTVTQTPSHSWSNGHTESILSESHSVIVMSSVENSRHSSPTGGPRGRLNGTGGPRECNSFLRHARETPDSYRDSPHSERHNLIAELRRNKAHRSKCMQIQLSATHLRSSSIPHLGFIL

SEQ ID NO: 100549 - protein, 230 aa, Homo sapiens
MSQQDAVAALSERLLVAAYKGQTENVVQLINKGARVAVTKGSVSAGDTPSSEQAVARKEEAREEFLSASPEPRAKDDRRRKSRPKVSAFSDPTPPADQQPGHQKNLHAHNHPKKRNRHRCSSPPPPHEFRAYQLYTLYRGKDGKVMQAPINGCRCEPLINKLENQLEATVEEIKAELGSVQDKMNTKLGQMENKTQHQMRVLDKLMVERLSAERTECLNRLQQHSDTEKH

SEQ ID NO: 100550 - protein, 118 aa, Homo sapiens
MNTSLSWFEQLDVLLNATDGNVVRNKQWLYPLGVSTELIGLCICFFCSSGCIFLGSPPQNSTAVTPAVLWEESEIMQKELKLLQYQLSQHQELLLKQLAEGRQAQVGSWKLLIQSSGQ

SEQ ID NO: 100551 - protein, 105 aa, Homo sapiens
MASNERDAISWYQKKIGAYDQQIWEKSIEQTQIKGLKNKPKKMGHIKPDLIDVDLIRGSTFAKAKPEIPWTSLTRKGLVRVVFFPLFSNWWIQVTSLRIFVWLLL

SEQ ID NO: 100552 - protein, 134 aa, Homo sapiens
MQPRWAQGATMWLGVLLTLLLCSSLEGQENSFTINSVDMKSLPDWTVQNGKNLTLQCFADVSTTSHVKPQHQMLFYKDDVLFYNISSMKSTESYFIPEVRIYDSGTYKCTVIVNNKEKTTAEYQVLVEGVPSPR

SEQ ID NO: 100553 - protein, 131 aa, Homo sapiens
MASLGANPRRTPQGPRPGAASSGFPSPAPVPGPREAEEEEVEEEEELAEIHLCVLWNSGYLGIAYYDTSDSTIHFMPDAPDHESLKLLQRVLDEINPQSVVTSAKQDENMTRFLGKLASQEHREPKRPEII

SEQ ID NO: 100554 - protein, 189 aa, Homo sapiens
  MOD_RES (1)..(1): Any amino acid
XCISHSRSSVEMDCFFPLVKDAYSHSSSENGGKSESVANLQAQPSLNSIHSSPGPKRSTNTLKKWLTSPVRRLNSGKADGNIKKQKKVRDGRKSFDLGSPKPGDETTPQGDSADEKSKKGWGEDEPDEESHTPLPPPMKIFDNDPTQDEMSSSLLAARQASTEVPTAADLVNAIEKLVKNKLPILLLWI

SEQ ID NO: 100555 - protein, 103 aa, Homo sapiens
MDEQSVESIAEVFRCFICMEKLRDARLCPHCSKLCCFSCIRRWLTEQRAQCPHCRAPLQLRELVNCRWAEEVTQQLDTLQLCSLTKHEENEKDKYVLNFFVQY

SEQ ID NO: 100556 - protein, 190 aa, Homo sapiens
MNSSTSTMSEEPDALSVVNQLRDLAADPLNRRAIVQDQGCLPGLILFMDHPNPPVVHSALLALRYLAECRANREKMKGELGMMLSLQNVIQKTTTPGETKLLASEIYDILQSSNMADGDSFNEMNSRRRKAQFFLGTTNKRAKTVVLHIDGLDDTSRRNLCEEALLKIKGVISFTFQMAVQRCVVRIRSD

SEQ ID NO: 100557 - protein, 47 aa, Homo sapiens
MASLAALALSLLLRLQLPPLPGARAQSAAGVAVPLMSTTATVVIVWL

SEQ ID NO: 100558 - protein, 663 aa, Homo sapiens
MDPSAPQPRAETSGKDIWHPGERCLAPSPDNGKLCEASIKSITVDENGKSFAVVLYADFQERKIPLKQLQEVKFVKDCPRNLIFDDEDLEKPYFPNRKFPSSSVAFKLSDNGDSIPYTINRYLRDYQREGTRFLYGHYIHGGGCILGDDMGLGKTVQVISFLAAVLHKKGTREDIENNMPEFLLRSMKKEPLSSTAKKMFLIVAPLSVLYNWKDELDTWGYFRVTVLHGNRKDNELIRVKQRKCEIALTTYETLRLCLDELNSLEWSAVIVDEAHRIKNPKARVTEVMKALKCNVRIGLTGTILQNNMKELWCVMDWAVPGLLGSGTYFKKQFSDPVEHGQRHTATKRELATGRKAMQRLAKKMSGWFLRRTKTLIKDQLPKKEDRMVYCSLTDFQKAVYQTVLETEDVTLILQSSEPCTCRSGQKRRNCCYKTNSHGETVKTLYLSYLTVLQKVANHVALLQAASTSKQQETLIKRICDQVFSRFPDFVQKSKDAAFETLSDPKYSGKMKVLQQLLNHCRKNRDKVLLFSFSTKLLDVLQQYCMASGLDYRRLDGSTKSEERLKIVKEFNSTQDVNICLVSTMAGGLGLNFVGANVVVLFDPTWNPANDLQAIDRAYRIGQCRDVKVLRLISLGTVEEIMYLRQIYKQMAFRKWLIFTQTRM

SEQ ID NO: 100559 - protein, 153 aa, Homo sapiens
MAFEQLLDDYPKCFIVGADNVGSKQMQQIRMSLRGKAVVLMGKNTMMRKAIRGHLENNPALEKLLPHIRGNVGFVFTKEDLTEIRDMLLANKVPAAARAGAIAPCEVTVPAQNTGLGPEKTSFFQALGITTKISRGTIEILSDVQLIKTGDKV

SEQ ID NO: 100560 - protein, 109 aa, Homo sapiens
MSSTRSQNPHGLKQIGLDQIWDDLRAGIQQVYTRQSMAKSRYMELYTHVYNYCTSVHQSNQARGAGVPPSKSKKGQTPGGAQFVGLELYKRLKEFLKNYLTNLLKLTCF

SEQ ID NO: 100561 - protein, 231 aa, Homo sapiens
  MOD_RES (1)..(1): Any amino acid
XRSAKKTKKGAKEKTPDEKKDEIEKIKAYPYMEGEPEDDVYLKRLYPRQIYEVEKAVHLLKKFQILDFTSPKQSVYLDLTLDMALGKKKNVEPFTSVLSLPYPFASEINKVAVFTENASEVKIAEENGAAFAGGTSLIQKIWDDEIVADFYVAVPEIMPELNRLRKKLNKKYPKLSRNSIGRDIPKMLELFKNGHEIKVDEERENFLQTKIATVPLWYVLSFVVQQVKVYY

SEQ ID NO: 100562 - protein, 187 aa, Homo sapiens
MLAGRPGTRSAVGELGTESSDNLDRAPLGPRESGGHHRPGSYLDMKIHLEKNLEEERQILLQQQKICRNRARKYFVESNRRKKAFEEKRKEQEEKEHQIREQILQQRKQKFEEVTEKFQRAHVPLSQRRKAVSRKPVPPLEEALKQIQESNLKSEVNLPFSRRPTINWSREEKRRKWSREERNREES

SEQ ID NO: 100563 - protein, 175 aa, Homo sapiens
MPTSSSFKHRIKEQEDYIRDWTAHREEIARISQDLALIAREINDVAGEIDSVTSSGTAPSTTLVDRVFDESLNFRKIPPLVHSKTPEGNNGRSGDPRPQAAEPPDHLTITRRRTWSRDEVMGDNLLLSSVFQFSKKIRQSIDKTAGKIRILFKDKDRNWDDIESKLRAESEVPIV

SEQ ID NO: 100564 - protein, 48 aa, Homo sapiens
PTINLQFKIQQLAISGLKVNRLDMYGEKYKPFKGIKYMTKAGKFQVRT

SEQ ID NO: 100565 - protein, 213 aa, Homo sapiens
MNDMMSLGIHRVWKDLLLWKMHPLPGTQLLDVAGGTGDIAFRFLNYVQSQHQRKQKRQLRAQQNLSWEEIAKEYQNEEDSLGGSRVVVCDINKEMLKVGKQKALAQGYRAGLAWVLGDAEELPFDDDKFDIYTIAFGIRNVTHIDQALQEAHRVLKPGGRFLCLEFSQVNNPLISRLYDLYSFQVIPVLGEVIAGDWKSYQYLVESIRRFPSQ

SEQ ID NO: 100566 - protein, 410 aa, Homo sapiens
MSLMVVSMACVGFFLLEGPWPHVGGQDKPFLSAWPGTVVSEGQHVTLQCRSRLGFNEFSLSKEDGMPVPELYNRIFRNSFLMGPVTPAHAGTYRCCSSHPHSPTGWSAPSNPVVIMVTGVHRKPSLLAHPGPLVKSGETVILQCWSDVSFERFLLHREGITEDPLRLVGQLHDAGSQVNYSMGPMTPALAGTYRCFGSVTHLPYELSAPSDPLDIVVVGLYGKPSLSAQPGPTVQAGENVTLSCSSRSLFDIYHLSREAEAGELRLTAVLRVNGTFQANFPLGPVTHGGTYRCFGSFRALPHAWSDPSDPLPVSVTGNSRYLHALIGTSVVIIPFAILLFFLLHRWCANKKNAVVMDQEPAGNRTVNREDSDEQDPQEVTYAQLNHCVFTQRKITRPSQRPKTPPTDTSV

SEQ ID NO: 100567 - protein, 65 aa, Homo sapiens
ITLGSLRLDCPAAVVDDNEKNLSLGLQTLRSLKCIINLDKHRLIMGKTDKEEIPFVETVSLNEDK

SEQ ID NO: 100568 - protein, 175 aa, Homo sapiens
  MOD_RES (1)..(1): Any amino acid
XDFMKQSRGMLLLYSLKNPSFPEYMFSSNSGVMCLDIHVDHPYLVAVGHYDGNVAIYNLKKPHSQPSFCSSAKSGKHSDPVWQVKWQKDDMDQNLNFFSVSSDGRIVSWTLVKRKLVHIDVIKLKVEGSTTEVPEGLQLHPVGCGTAFDFHKEIDYMFLVGTEEGKIYKDPDVHL

SEQ ID NO: 100569 - protein, 272 aa, Homo sapiens
MSLQVLNDKNVSNEKNTENCDFLFSPPEVTGRSSVLRVSQKENVPPKNLAKAMKVTFQTPLRDPQTHRILSPSMASKLEAPFTQDDTLGLENSHPVWTQKENQQLIKEVDAKTTHGILQKPVEADTDLLGDASPAFGSGSSSESGPGALADLDCSSSSQSPGSSENQMVSPGKVSGSPEQAVEENLSSYSLDRRVTPASETLEDPCRTESQHKAETPHGAEEECKAETPHGAEEECRHGGVCAPAAVATSPPGAIPKEACGGAPLQGLPGEA

SEQ ID NO: 100570 - protein, 11 aa, Homo sapiens
MNIFDRKINFD

SEQ ID NO: 100571 - protein, 333 aa, Homo sapiens
MDVRALPWLPWLLWLLCRGGGDADSRAPFTPTWPRSREREAAAFRESLNRHRYLNSLFPSENSTAFYGINQFSYLFPEEFKAIYLRSKPSKFPRYSAEVHMSIPNVSLPLRFDWRDKQVVTQVRNQQMCGGCWAFSVVGAVESAYAIKGKPLEDLSVQQVIDCSYNNYGCNGGSTLNALNWLNKMQVKLVKDSEYPFKAQNGLCHYFSGSHSGFSIKGYSAYDFSDQEDEMAKALLTFGPLVVIVDAVSWQDYLGGIIQHHCSSGEANHAVLITGFDKTVFVFILCSPCIKGSEFKHIFLLIGECPKHSILDCAEFLGKFLGSRWLCPCQNGK

SEQ ID NO: 100572 - protein, 575 aa, Homo sapiens
MPPGKVLQPVLKMKVDELFLYWLSEASTQRMLQDCLRRIKAPGRDQPTPGDGEQPGAWPTAPLAAPRPSGLEPPGTPGPGPALPLGAASSPRNAPHVRGTRRSAGTRVVQTRKEEPLPPATSQSIPTFYFPRGRPQDSVNVDAVISKIESTFARFPHERATMDDMGLVAKACGCPLYWKGPLFYGAGGERTGSVSVHKFVAMWRKILQNCHDDAAKFVHLLMSPGCNYLVQEDFVPFLQDVVNTHPGLSFLKEASEFHSRYITTVIQRIFYAVNRSWSGRITCAELRRSSFLQNVALLEEEADINQLTEFFSYEHFYVIYCKFWELDTDHDLLIDADDLARHNDHALSTKMIDRIFSGAVTRGRKVQKEGKISYADFVWFLISEEDKKTPTSIEYWFRCMDLDGDGALSMFELEYFYEEQCRRLDSMAIEALPFQDCLCQMLDLVKPRTEGKITLQDLKRCKLANVFFDTFFNIEKYLDHEQKEQISLLRDGDSGGPELSDWEKYAAEEYDILVAEETVGEPWEDGFEAELSPVEQKLSALRSPLAQRPFFEAPSPLGAVDLYEYACGDEDLEPL

SEQ ID NO: 100573 - protein, 146 aa, Homo sapiens
MEKLLFEYLCQLEKALPTPQAQQLQDVLSWMQPGVSITSSLAWRQYGVDMGWLLPECSVTDSVNLAEPMEQNPPQQQRLALHNPLPKAKPGTHLPQGPSSRTHPEPLAGRHFNLAPLGRRRVQSQWASTRGGHKERPTVMLFPFRN

SEQ ID NO: 100574 - protein, 166 aa, Homo sapiens
MQLHPVADSSPAGAKWTETEIEMLRAAVKRFGDDLNHISCVIKERTVAQIKATVKRKVYEDSGIPLPAESPKKGPKKVASGVLSPPPAAPPPSSSSVPEAGGPPIKKQKADVTLSALNDSDANSDVVDIEGLGETPPAKKLNFDQDSLTLDSGLLMTSADPPLLSC

SEQ ID NO: 100575 - protein, 363 aa, Homo sapiens
MTTLPPLPMTRPKLTALARQKLPCSSRKIPRSQLIKEKDDIDHYLEVNFKGLSKEEVAAYRNSYKKNICVDMLRDGYHKSFTELFALMERWDALREAARVRSLFWLQKPLEEQPDKLDYLYHYLTRAEDAERKESFEDVHNNLYALACYFNNSEDKWVRNHFYERCFKIAQLIKIDCGKKEAEAHMHMGLLYEEDGQLLEAAEHYEAFHQLTQGRIWKDETGRSLNLLACESLLRTYRLLSDKMLENKEYKQAIKILIKASEIAKEGSDKKMEAEASYYLGLAHLAAEEYETALTVLDTYCKISTDLDDDLSLGRGYEAIAKVLQRDMSLSSNNSHLLALLLIWNILASFPGFEFLVDSVKAK

SEQ ID NO: 100576 - protein, 256 aa, Homo sapiens
MSHCSGYSDPSSFAEDGPEVLDEEGTQEDLEYKLKGLIDLTLDKSAKTRQAALEGIKNALASKMLYEFILERRMTLTDSIERCLKKGKSDEQRAAAALASVLCIQLGPGIESEEILKTLGPILKKIICDGSASMQARQTCATCFGVCCFIATDDITELYSTLECLENIFTKSYLKEKDTTVICSTPNTVLHISSLLAWTLLLTICPINEVKKKLEMHFHKLPSLLSCDDVNMRIAAGESLALLFELARGIESFISL

SEQ ID NO: 100577 - protein, 314 aa, Homo sapiens
MATELDKIFLILAIAEFIISMLGNVFIGLVNCSEGIKNQKVFSADFILTCLAISTIGQLLVILFDSFLVGLASHLYTTYRLGKTVIMLWHMTNHLTTWLATCLSIFYFFKIAHFPHSLFLWLRWRMNGMIVMLLILSLFLLIFDSLVLEIFIDISLNIIDKSNLTLYLDESKTLYDKLSILKTLLSLTSFIPFSLFLTSLLFLFLSLVRHTRNLKLSSLGSRDSSTEAHRRAMKMVMSFLFLFIVHFFSLQVANWIFFMLWNNKCIKFVMLALNAFPSCHSFILILGNSKLQQTAVRLLWHLRNYTKTPNPLPL

SEQ ID NO: 100578 - protein, 160 aa, Homo sapiens
MWQPLELISGKDQPQVPCIFCLTEERGIWYLDQIRREQYITNKEFLNSHLLPKKKHQKIYLFTLEPRTIEDFESMNTYLQTSPTSSFITTSFCSLQTPEGVYCLVGFILTYRKFNYKDNTDLVEFKTLTEEEVEEVLRNIFKISLGRNLVPKPGDGSLTI

SEQ ID NO: 100579 - protein, 681 aa, Homo sapiens
CEKSAVLSFSIEPEDQNETFFSEESREVNPGDVSLNNISTQSKWLKYQNTSQCNVATPNRVDKRITDGFFAEAVSGMHFRDTSERQSDAVNESSLDSVHLQMIKGMLYQQRQDFSSQDSVSRKKVLSLNLKQTSKTEEIKNVLGGSTCYNYSVKDLQEISGSELCFPSGQKIKSAYLPQRQIHIPAVFQSPAHYKQTFTSCLIEHLNILLFGLAQNLQKALSKVDISFYTSLKGEKLKNAENNVPSCHHSQPAKLVMVKKEGPNKGRLFYTCDGPKADRCKFFKWLEDVTPGYSTQEGARPGMVLSDIKSIGLYLRSQKIPLYEECQLLVRKGFDFQRKQYGKLKKFTTVNPEFYNEPKTKLYLKLSRKERSSAYSKNDLWVVSKTLDFELDTFIACSAFFGPSSINEIEILPLKGYFPSNWPTNMVVHALLVCNASTELTTLKNIQDYFNPATLPLTQYLLTTSSPTIVSNKRVSKRKFIPPAFTNVSTKFELLSLGATLKLASELIQVHKLNKDQATALIQIAQMMASHESIEEVKELQTHTFPITIIHGVFGAGKSYLLAVVILFFVQLFEKSEAPTIGNARPWKLLISSSTNVAVDRVLLGLLSLGFENFIRVGSVRKIAKPILPYSLHAGSENESEQLKELHALMKEDLTPTERVYVRKSIEQHKLGTNRTLLKQV

SEQ ID NO: 100580 - protein, 132 aa, Homo sapiens
  MOD_RES (1)..(1): Any amino acid
XSADAEANAVCEIVHVKSESEGRPERVFHLCCSSPESRKDFLKAVHSILRDKHRRQLLKTESLPSSQQYVPFGGKRLCALKGARPAMSRADGKRKQRLLIVAFTGSSATHPSENTRKSGAWRGCHCLLYIRS

SEQ ID NO: 100581 - protein, 864 aa, Homo sapiens
MFPTGFSSPSPSAAAAAQEVRSATDGNTSTTPPTSAKKRKLNSSSSSSSNSSNEREDFDSTSSSSSTPPLQPRDSASPSTSSFCLGVSVAASSHVPIQKKLRFEDTLEFVGFDAKMAEESSSSSSSSSPTAATSQQQQLKNKSILISSVASVHHANGLAKSSTTVSSFANSKPGSAKKLVIKNFKDKPKLPENYTDETWQKLKEAVEAIQNSTSIKYNLEELYQAVENLCSYKISANLYKQLRQICEDHIKAQIHQFREDSLDSVLFLKKIDRCWQNHCRQMIMIRSIFLFLDRTYVLQNSMLPSIWERNGEAIDRSLLRSLLSMLSDLQIYQDSFEQRFLEETNRLYAAEGQKLMQEREVPEYLHHVNKRLEEEADRLITYLDQTTQKSLIATVEKQLLGEHLTAILQKGLNNLLDENRIQDLSLLYQLFSRVRGGVQVLLQQWIEYIKAFGSTIVINPEKDKTMVQELLDFKDKVDHIIDICFLKNEKFINAMKEAFETFINKRPNKPAELIAKYVDSKLRAGNKEATDEELEKMLDKIMIIFRFIYGKDVFEAFYKKDLAKRLLVGKSASVDAEKSMLSKLKHECGAAFTSKLEGMFKDMELSKDIMIQFKQYMQNQNVPGNIELTVNILTMGYWPTYVPMEVHLPPEMVKLQEIFKTFYLGKHSGRKLQWQSTLGHCVLKAEFKEGKKELQVSLFQTLVLLMFNEGEEFSLEEIKQATGIEDGELRRTLQSLACGKARVLAKNPKGKDIEDGDKFICNDDFKHKLFRIKINQIQMKETVEEQASTTERVFQDRQYQIDAAIVRIMKMRKTLSHNLLVSEVYNQLKFPVKPADLKKRIESLIDRDYMERDKENPNQYNYIA

SEQ ID NO: 100582 - protein, 378 aa, Homo sapiens
MQSLRDLGVKISEQQAEKILKRIRTGHFWGPVTYMDKNGTMTIDWNEWRDYHLLHPVENIPEIILYWKHSTIFDVGENLTVPDEFTVEERQTGMWWRHLVAGGGAGAVSRTCTAPLDRLKVLMQVHASRSNNMGIVGGFTQMIREGGARSLWRGNGINVLKIAPESAIKFMAYEQIKRLVGSDQETLRIHERLVAGSLAGAIAQSSIYPMEVLKTRMALRKTGQYSGMLDCARRILAREGVAAFYKGYVPNMLGIIPYAGIDLAVYETLKNAWLQHYAVNSADPGVFVLLACGTMSSTCGQLASYPLALVRTRMQAQASIEGAPEVTMSSLFKHILRTEGAFGLYRGLAPNFMKVIPAVSISYVVYENLKITLGVQSR

SEQ ID NO: 100583 - protein, 101 aa, Homo sapiens
MGTRSSPEEGTPPPLVPECDVEVQPQGHPEESREQEASEVLAEPSSRGGAEQQAEEEEVGEGSSTESSRDAPEATPPIAMAATPPASTSSREGVRGAARRL

SEQ ID NO: 100584 - protein, 66 aa, Homo sapiens
  MOD_RES (1)..(1): Any amino acid
XGCIPCQNMELFAVLCIETSHYVAFVKYGKDDSAWLFFDSMADRDGTENAFLLHVAQGSGFGAILH

SEQ ID NO: 100585 - protein, 111 aa, Homo sapiens
MDTMMLNVRNLFEQLVRRVEILSEGNEVQFIQLAKDFEDFRKKWQRTDHELGKYKDLLMKAETERSALDVKLKHARNQVDVEIKRRQRAEADCEKLERQIQLIREMLMCDT

SEQ ID NO: 100586 - protein, 78 aa, Homo sapiens
  MOD_RES (1)..(1): Any amino acid
XEREVGFAEEVLVTKTDMEEKAQVMLELKTRVEELKMENEYQLRLKDMNYSEKIKELTDKFIQEMESLKTKNQVCLRD

SEQ ID NO: 100587 - protein, 115 aa, Homo sapiens
MDDKKKKRSPKPCLAQPAQAPGTLRRVPVPTSHSGSLALGLPHLPSPKQRAKFKRVGKEKCRPVLAGGGSGSAGTPLQHSFLTEVTDVYEMEGGLLNLLNDFHSGRLQAFAGRPQ

SEQ ID NO: 100588 - protein, 176 aa, Homo sapiens
DMDMADYSAALDPAYTTLEFENVQVLTMGNGPSSPHCLTVALLGAWHSDVMILLPLRLARLRHPLRHHWSISGGVDSSPQGGLLAGRLLGLSEDHARSARQKHTRDSKQAAAALGGVLCGPTRTTALPWAAPRPHHFFQAQELCAPEAEAKPLNWESQRQDHLQLWNQKDLGSNPA

SEQ ID NO: 100589 - protein, 201 aa, Homo sapiens
MLGITSCSDQQAKEGEGLEGSSTGSSSGNHGGSGGGNGHKPGCEKPGNEARGSGESGIQGFRGQGVSSNMRNSETSPGMFNFDTFWKNFKSKLGFINWDAINKNQVPPPSTRALLYFSRLWEDFKQNTPFLNWKAIIEGADASSLQKRAGRDDQNYNYNQHAYPTAYGGKYSVKTPAKGGVSPSSSASRVQPGLLQWVKFW

SEQ ID NO: 100590 - protein, 118 aa, Homo sapiens
MAGYLPPKGYAPSPPPPYPVTPGYPEPALHPGPGQAPVPAQVPAPAPGFALFPSPGPVALGSAAPFLPLPGVPSGLEFLVQIDQILIHQKAERVENGSTGSTRHHHWPRATDLASLPP

SEQ ID NO: 100591 - protein, 688 aa, Homo sapiens
MAWTARDRGALGLLLLGLCLCAAQRGPPGEQGPPGPPGPPGVPGIDGIDGDRGPKGPPGPPGPAGEPGKPGAPGKPGTPGADGLTGPDGSPGSIGSKGQKGEPGVPGSRGFPGRGIPGPPGPPGTAGLPGELGRVGPVGDPGRRGPPGPPGPPGPRGTIGFHDGDPLCPNACPPGRSGYPGLPGMRGHKGAKGEIGEPGRQGHKGEEGDQGELGEVGAQGPPGAQGLRGITGIVGDKGEKGARGLDGEPGPQGLPGAPGDQGQRGPPGEAGPKGDRGAEGARGIPGLPGPKGDTGLPGVDGRDGIPGMPGTKELSKIALLMKGEPGKPGPPGDAGLQGLPGVPGIPGAKGVAGEKGSTGAPGKPGQMGNSGKPGQQGPPGEVGPRGPQGLPGSRGELGPVGSPGLPGKLGSLGSPGLPGLPGPPGLPGMKGDRGVVGEPGPKGEQGASGEEGEAGERGELGDIGLPGPKGSAGNPGEPGLRGPEGSRGLPGVEGPRGPPGPRGVQGEQGATGLPGVQGPPGRAPTDQHIKQVCMRVIQEHFAEMAASLKRPDSGATGLPGRPGPPGPPGPPGENGFPGQMGIRGLPGIKGPPGALGLRGPKGDLGEKGERGPPGRGPNGLPGAIGLPGDPGPASYGRNGRDGERGPPGVAGIPGVPGPPGPPGLPGFCEPASCTMQAGQRAFNKGPDP

SEQ ID NO: 100592 - protein, 85 aa, Homo sapiens
FSHQRPCLLKSLKREGANKLRYPPNSQSKVDWGKFFLLKRFNKEKLGLLLLTFLGIVAAVLVKFTDCVGPVSRDEHQISKPSPVC

SEQ ID NO: 100593 - protein, 430 aa, Homo sapiens
MSSPTTSSLDTPLPGNGPPQPGAPSSSPTVKEEGPEPWPGGPDPDVPGTDEASSACSTDWVIPDPEEEPERKRKKGPAPKMLGHELCRVCGDKASGFHYNVLSCEGCKGFFRRSVVRGGARRYACRGGGTCQMDAFMRRKCQQCRLRKCKEAGMREQCVLSEEQIRKKKIRKQQQESQSQSQSPVGPQGSSSSASGPGASPGGSEAGSQGSGEGEGVQLTAAQELMIQQLVAAQLQCNKRSFSDQPKVTEIVDFAKQVPGFLQLGREDQIALLKASTIEIMLLETARRYNHETECITFLKDFTYSKDDFHRAGLQVEFINPIFEFSRAMRRLGLDDAEYALLIAINIFSADRPNVQEPGRVEALQQPYVEALLSYTRIKRPQDQLRFPRMLMKLVSLRTLSSVHSEQVFALRLQDKKLPPLLSEIWDVHE

SEQ ID NO: 100594 - protein, 162 aa, Homo sapiens
MAPSVPAAEPEYPKGIRAVLLGPPGAGKGTQAPRLAENFCVCHLATGDMLRAMVASGSELGKKLKATMDAGKLVSDEMVVELIEKNLETPLCKNGFLLDGFPRTVRQAEMLDDLMEKRKEKLDSVIEFSIPDSLLIRRITGSIEHRNASASGHVCSDRPTLL

SEQ ID NO: 100595 - protein, 156 aa, Homo sapiens
MNFASVFAVLFNGCTGIMAGANMSGELKDPSRAIPLGTIVAVAYTFFVYVLLFFLSSFTCDRTLLQEDYGFFRAISLWPPLVLIGIYATALSASMSSLIGASRILHALARDDLFGVILAPAKVVSRGGNPWAAVLYSWGLVQLVLLAGKLNTLAAV

SEQ ID NO: 100596 - protein, 50 aa, Homo sapiens
MVLQDGQTFNQMEDLLADFEGPSIMDCKMGSRRQMGPVTPTSRRRRHWSR

SEQ ID NO: 100597 - protein, 66 aa, Homo sapiens
MLDTMEAPGHSRQLLLQLNNQRTKGFLCDVIIVVQNALFRAHKNVLAASSAYLKSLVVHDNLLNLD

SEQ ID NO: 100598 - protein, 1907 aa, Homo sapiens
MSDTDSDEDSAGGGPFSLAGFLFGNINGAGQLEGESVLDDECKKHLAGLGALGLGSLITELTANEELTGTDGALVNDEGWVRSTEDAVDYSDINEVAEDESRRYQQTMGSLQPLCHSDYDEDDYDADCEDIDCKLMPPPPPPPGPMKKDKDQDSITGVSENGEGIILPSIIAPSSLASEKVDFSSSSDSESEMGPQEATQAESEDGKLTLPLAGIMQHDATKLLPSVTELFPEFRPGKVLRFLRLFGPGKNVPSVWRSARRKRKKKHRELIQEEQIQEVECSVESEVSQKSLWNYDYAPPPPPEQCLSDDEITMMAPVESKFSQSTGDIDKVTDTKPRVAEWRYGPARLWYDMLGVPEDGSGFDYGFKLRKTEHEPVIKSRMIEEFRKLEENNGTDLLADENFLMVTQLHWEDDIIWDGEDVKHKGTKPQRASLAGWLPSSMTRNAMAYNVQQGFAATLDDDKPWYSIFPIDNEDLVYGRWEDNIIWDAQAMPRLLEPPVLTLDPNDENLILEIPDEKEEATSNSPSKESKKESSLKKSRILLGKTGVIKEEPQQNMSQPEVKDPWNLSNDEYYYPKQQGLRGTFGGNIIQHSIPAVELRQPFFPTHMGPIKLRQFHRPPLKKYSFGALSQPGPHSVQPLLKHIKKKAKMREQERQASGGGEMFFMRTPQDLTGKDGDLILAEYSEENGPLMMQVGMATKIKNYYKRKPGKDPGAPDCKYGETVYCHTSPFLGSLHPGQLLQAFENNLFRAPIYLHKMPETDFLIIRTRQGYYIRELVDIFVVGQQCPLFEVPGPNSKRANTHIRDFLQVFIYRLFWKSKDRPRRIRMEDIKKAFPSHSESSIRKRLKLCADFKRTGMDSNWWVLKSDFRLPTEEEIRAMVSPEQCCAYYSMIAAEQRLKDAGYGEKSFFAPEEENEEDFQMKIDDEVRTAPWNTTRAFIAAMKGKCLLEVTGVADPTGCGEGFSYVKIPNKPTQQKDDKEPQPVKKTVTGTDADLRRLSLKNAKQLLRKFGVPEEEIKKLSRWEVIDVVRTMSTEQARSGEGPMSKFARGSRFSVAEHQERYKEECQRIFDLQNKVLSSTEVLSTDTDSSSAEDSDFEEMGKNIENMLQNKKTSSQLSREREEQERKELQRMLLAAGSAASGNNHRDDDTASVTSLNSSATGRCLKIYRTFRDEEGKEYVRCETVRKPAVIDAYVRIRTTKDEEFIRKFALFDEQHREEMRKERRRIQEQLRRLKRNQEKEKLKGPPEKKPKKMKERPDLKLKCGACGAIGHMRTNKFCPLYYQTNAPPSNPVAMTEEQEEELEKTVIHNDNEELIKVEGTKIVLGKQLIESADEVRRKSLVLKFPKQQLPPKKKRRVGTTVHCDYLNRPHKSIHRRRTDPMVTLSSILESIINDMRDLPNTYPFHTPVNAKVVKDYYKIITRPMDLQTLRENVRKRLYPSREEFREHLELIVKNSATYNGPKHSLTQISQSMLDLCDEKLKEKEDKLARLEKAINPLLDDDDQVAFSFILDNIVTQKMMAVPDSWPFHHPVNKKFVPDYYKVIVNPMDLETIRKNISKHKYQSRESFLDDVNLILANSVKYNGPESQYTKTAQEIVNVCYQTLTEYDEHLTQLEKDICTAKEAALEEAELESLDPMTPGPYTPQPPDLYDTNTSLSMSRDASVFQDESNMSVLDIPSATPEKQVTQMRQGRGRLGEEDSDVDIEGYDDEEEDGKPKTPAPEGEDGDGDLADEEEGTVQQPQASVLYEDLLMSEGEDDEEDAGSDEEGDNPFSAIQLSESGSDSDVGSGGIRPKQPRMLQENTRMDMENEESMMSYEGDGGEASHGLEDSNISYGSYEEPDPKSNTQDTSFSSIGGYEVSEEEEDEEEEEQRSGPSVLSQVHLSEDEEDSEDFHSIAGDSDLDSDE

SEQ ID NO: 100599 - protein, 150 aa, Homo sapiens
MIQSANDKNFDDEDSVDGNRPSSASSTSSKAPPSSRRNVGMGTTRRLGSSTLGSKSSAAKEGAGAVDEEDFIKAFDDVPVVQIYSSRDLEESINKIREILSDDKHDWEQRVNALKKIRSLLLAGAAEYDNFFQHLRLLDGAFKLSAKDLR

SEQ ID NO: 100600 - protein, 130 aa, Homo sapiens
MCDFTEDQTAGDGKILYSQCGDVMRALGQNPTNAEVLKVLGNPKSDEMNVKVLDFEHFLPMLQTVAKNKDQGTYEDYVEGLRVFDKEGNGTVMGAEIRHVLVTLGEKMTEEEVEMLVAGHEDSNGCINYE

SEQ ID NO: 100601 - protein, 42 aa, Homo sapiens
MSLVPATNYIYTPLNQLKGGTIVNVYGVVKFFKPPYLSKGTE

SEQ ID NO: 100602 - protein, 474 aa, Homo sapiens
MSIQAPPRLLELAGQSLLRDQALSISAMEELPRVLYLPLFMEAFRRRHFQTLTVMVQAWPFTCLPLGSLMKTLHLETLKALLEGLHMLLTQKDRPRRWKLQVLDLRDVDENFWARWPGAWALSCFPETMSKRQTAEDCPRMGEHQPLKVFIDICLKEIPQDECLRYLFQWVYQRRGLVHLCCSKLVNYLTPIKHLRKSLKIIYLNSIQQLEIRNMSWPRLIRKLRCYLKEMKNLRKLVFSRCHHSMSDNELEGRLVTKFSSVFLRLEHLQLLKIKLITFFSGHLEQLIRCLQNPLENLELTYGYLLEEDMKCLSQYPSLGYLKHLNLSYVLLFRISLEPLGALLEKIAASLETLILEGCQIHYSQLSAILPGLSHCSQLTTFYFGRNCMSMGALKDLLCHTSGLSKLSLETYPAPEESLNSLVRVDWEIFALLRAELMCTLREVRQPKRIFIGPTPCPSCGSSPSEELELHLCC

SEQ ID NO: 100603 - protein, 194 aa, Homo sapiens
  MOD_RES (1)..(1): Any amino acid
XASWKRLTEEFLNAPLPSIKEIKTDAHYSILSLLLCLSDSPSNSSYVETPRNKEVEKKDDFDWGKYLMEDEEMDIGPYMDTPNWSEESEEENDQQPLSREDSGIQVDRTPLEEQDQNRKLDPCISWKADEPDDRSWLEHHVVHQYWTARPSQFPHSLHLHSNLAAVWDQHLYSSDPLYVPDDRVLVTETQVIRE

SEQ ID NO: 100604 - protein, 111 aa, Homo sapiens
MSHPSWLPPKSTGEPLGHVPARMETTHSFGNPSISVSTQQPPKKFAPVVAPKPKYNPYKQPGGEGDFLPPPPPPLDDSSALPSISGNFPPPPPLDEEAFKVQGNPGGKTLE

SEQ ID NO: 100605 - protein, 44 aa, Homo sapiens
MNPPEGAAEEGGAADSDVDAFFRTAKWKLLLAQCSPFLTVGYSK

SEQ ID NO: 100606 - protein, 404 aa, Homo sapiens
MARRYDELPHYPGIVDGPAALASFPETVPAVPGPYGPHRPPQPLPPGLDSDGLKREKDEIYGHPLFPLLALVFEKCELATCSPRDGAGAGLGTPPGGDVCSSDSFNEDIAAFAKQVRSERPLFSSNPELDNLMIQAIQVLRFHLLELEKGKMPIDLVIEDRDGGCREDFEDYPASCPSLPDQNNMWIRDHEDSGSVHLGTPGPSSGGLASQSGDNSSDQGDGLDTSVASPSSGGEDEDLDQERRRNKKRGIFPKVATNIMRAWLFQHLSRRSEAPVLPDVCLGLGSPSPGPRWARPWGSDCGRPGRQSDSCWWLQHPYPSEEQKKQLAQDTGLTILQVNNWFINARRRIVQPMIDQSNRTGQGAAFSPEGQPIGGYTETQPHVAVRPPGSVGMSLNLEGEWHYL

SEQ ID NO: 100607 - protein, 73 aa, Homo sapiens
GILRIIKPCNHVLSLSFPIRRDDGSWEVIEGYRAQHSQHRTPCKGDAQLSPVFISRSSANSLKQLVYHSLGRN

SEQ ID NO: 100608 - protein, 502 aa, Homo sapiens
MENQAHNTMGTSPCEAELQELMEQIDIMVSNKKMDWERKMRALETRLDLRDQELANAQTCLDQKGQEVGLLRQKLDSLEKCNLAMTQNYEGQLQSLKAQFSKLTNNFEKLRLHQMKQNKVPRKELPHLKEEIPFELSNLNQKLEEFRAKSREWDKQEILYQTHLISLDAQQKLLSEKCNQFQKQAQSYQTQLNGKKQCLEDSSSEIPRLICDPDPNCEINERDEFIIEKLKSAVNEIALSRNKLQDENQKLLQELKMYQRQCQAMEAGLSEVKSELQSRDDLLRIIEMERLQLHRELLKIGECQNAQGNKTRLESSYLPSIKEPERKIKELFSVMQDQPNHEKELNKIRSQLQQVEEYHNSEQERMRNEISDLTEELHQKEITIATVTKKAALLEKQLKMELEIKEKMLAKQKVSDMKYKAVRTENTHLKGMMGDLDPGEYMSMDFTNREQSRHTSINKLQYENERLRNDLAKLHVNGKSTWTNQNTYEETGRYAYQSQIKT

SEQ ID NO: 100609 - protein, 103 aa, Homo sapiens
MPKVKRSRKAPPDGWELIEPTLDELDQKMREELYEYCIKEGYADKNLIAKWKKQGYENLCCLRCIQTRDTNFGTNCICRVPKSKLEVGRIIECTHCGCRGCSG

SEQ ID NO: 100610 - protein, 266 aa, Homo sapiens
MARCCSQAQKMAACMAGRPGVGSCCGGWVATQMVLCPVSRHLSTFPDPGLVPAGHQRSVETVSFSPDSRQLASGGWDKRVMLWDVQSGQMLRLLVGHRDSIQSSDFSPTVNCLATGSWDSTVHIWDLRMVTPAVSHQALEGHSANISCLCYSASGLLASGSWDKTIHIWKPTTSSLLIQLKGHVTWVKSIAFSPDELWLASAGYSRMVKVWDCNTGKCLETLKQGVLDVAHTCAFTPDGKILVSGAADQTRRQISRTSKSPRDPQT

SEQ ID NO: 100611 - protein, 442 aa, Homo sapiens
MAGVEEVAASGSHLNGDLDPDDREEGAASTAEEAAKKKRRKKKKSKGPSADGDGDGDGATGKKKKKKKKKRGPKVQTDPPSVPICDLYPNGVFPKGQECEYPPTQDGRTAAWRTTSEEKKALDQASEEIWNDFREAAEAHRQVRKYVMSWIKPGMTMIEICEKLEDCSRKLIKENGLNAGLAFPTGCSLNNCAAHYTPNAGDTTVLQYDDICKIDFGTHISGRIIDCAFTVTFNPKYDTLLKAVKDATNTGIKCAGIDVRLCDVGEAIQEVMESYEVEIDGKTYQVKPIRNLNGHSIGQYRIHAGKTVPIVKGGEATRMEEGEVYAIETFGSTGKGVVHDDMECSHYMKNFDVGHVPIRLPRTKHLLNVINENFGTLAFCRRWLDRLGESKYLMALKNLCDLGIVDPYPPLCDIKGSYTAQFEHTILLRPTCKEVVSRGDDY

SEQ ID NO: 100612 - protein, 148 aa, Homo sapiens
MPEPCSAEFIYECDVRELQKPGLLGDLWPEQDIKDSFQQVILRRHGKCEHENLQLRKGSANVVECKVYKKGYNELNQCLTTTQSKIFPCDKYIKVFHKIFNSNRHKTRHTGEKPFKCKKCDESFCMLLHLHQHKRIHIRENSYQCEEC

SEQ ID NO: 100613 - protein, 381 aa, Homo sapiens
MVPWVRTMGQKLKQRLRLDVGREICRQYPLFCFLLLCLSAASLLLNRYIHILMIFWSFVAGVVTFYCSLGPDSLLPNIFFTIKYKPKQLGLQELFPQGHSCAVCGKVKCKRHRPSLLLENYQPWLDLKISSKVDASLSEVLELVLENFVYPWYRDVTDDESFVDELRITLRFFASVLIRRIHKVDIPSIITKKLLKAAMKHIEVIVKARQKVKNTEFLQQAALEEYGPELHVALRSRRDELHYLRKLTELLFPYILPPKATDCRSLTLLIREILSGSVFLPSLDFLADPDTVNHLLIIFIDDSPPEKATEPASPLVPFLQKFAEPRNKKPSVLKLELKQIREQQDLLFRFMNFLKQEGAVHVLQFCLTVGEAYLCILRKGI

SEQ ID NO: 100614 - protein, 127 aa, Homo sapiens
MDNLSSEEIQQRAHQITDESLESTRRILGLAIESQDAGIKTITMLDEQKEQLNRIEEGLDQINKDMRETEKTLTELNKCCGLCVCPCNRLTPTEIVLILPMPEQRNSLTAKATAVLLYHLFTSVAPP

SEQ ID NO: 100615 - protein, 282 aa, Homo sapiens
MVDRRVESEESGDEEGKKHSSGIVADLSEQSLKDGEERGEEDPEEEHELPVDMETINLDRDAEDVDLNHYRIGKIEGFEVLKKVKTLCLRQNLIKCIENLEELQSLRELDLYDNQIKKIENLEALTELEILDISFNLLRNIEGVDKLTRLKKLFLVNNKISKIENLSNLHQLQMLELGSNRIRAIENIDTLTNLESLFLGKNKITKLQNLDALTNLTVLSMQSNRLTKIEGLQNLVNLRELYLSHNGIEVIEGLENNNKLTMLDIASNRIKKIENISHLTEL

SEQ ID NO: 100616 - protein, 60 aa, Homo sapiens
MKGEAGHMLHNEKSKQVPSKCLVSSSGASMGFYWWLTQQENLTSSLATEFRSARMNLWIL

SEQ ID NO: 100617 - protein, 1830 aa, Homo sapiens
MTTMLQKSDSNASFLRAARAGNLDKVVEYLKGGIDINTCNQNGLNALHLAAKEGHVGLVQELLGRGSSVDSATKKGNTALHIASLAGQAEVVKVLVKEGANINAQSQNGFTPLYMAAQENHIDVVKYLLENGANQSTATEDGFTPLAVALQQGHNQAVAILLENDTKGKVRLPALHIAARKDDTKSAALLLQNDHNADVQSKMMVNRTTESGFTPLHIAAHYGNVNVATLLLNRGAAVDFTARNGITPLHVASKRGNTNMVKLLLDRGGQIDAKTRDGLTPLHCAARSGHDQVVELLLERGAPLLARTKNGLSPLHMAAQGDHVECVKHLLQHKAPVDDVTLDYLTALHVAAHCGHYRVTKLLLDKRANPNARALNGFTPLHIACKKNRIKVMELLVKYGASIQAITESGLTPIHVAAFMGHLNIVLLLLQNGASPDVTNIRGETALHMAARAGQVEVVRCLLRNGALVDARAREEQTPLHIASRLGKTEIVQLLLQHMAHPDAATTNGYTPLHISAREGQVDVASVLLEAGAAHSLATKKGFTPLHVAAKYGSLDVAKLLLQRRAAADSAGKNGLTPLHVAAHYDNQKVALLLLEKGASPHATAKNGYTPLHIAAKKNQMQIASTLLNYGAETNIVTKQGVTPLHLASQEGHTDMVTLLLDKGANIHMSTKSGLTSLHLAAQEDKVNVADILTKHGADQDAHTKLGYTPLIVACHYGNVKMVNFLLKQGANVNAKTKNGYTPLHQAAQQGHTHIINVLLQHGAKPNATTANGNTALAIAKRLGYISVVDTLKVVTEEVTTTTTTITEKHKLNVPETMTEVLDVSDEEGDDTMTGDGGEYLRPEDLKELGDDSLPSSQFLDGMNYLRYSLEGGRSDSLRSFSSDRSHTLSHASYLRDSAVMDDSVVIPSHQVSTLAKEAERNSYRLSWGTENLDNVALSSSPIHSGRASPCLERDNSSFLVSFMVDARGGAMRGCRHNGLRIIIPPRKCTAPTRVTCRLVKRHRLATMPPMVEGEGLASRLIEVGPSGAQFLGPVIVEIPHFAALRGKERELVVLRSENGDSWKEHFCDYTEDELNEILNGMDEVLDSPEDLEKKRICRIITRDFPQYFAVVSRIKQDSNLIGPEGGVLSSTVVPQVQAVFPEGALTKRIRVGLQAQPMHSELVKKILGNKATFSPIVTLEPRRRKFHKPITMTIPVPKASSDVMLNGFGGDAPTLRLLCSITGGTTPAQWEDITGTTPLTFVNECVSFTTNVSARFWLIDCRQIQESVTFASQVYREIICVPYMAKFVVFAKSHDPIEARLRCFCMTDDKVDKTLEQQENFAEVARSRDVEVLEGKPIYVDCFGNLVPLTKSGQHHIFSFFAFKENRLPLFVKVRDTTQEPCGRLSFMKEPKSTRGLVHQAICNLNITLPIYTKESESDQEQEEEIDMTSEKNPQDEQERIEERLAYIADHLGFSWTELARELDFTEEQIHQIRIENPNSLQDQSHALLKYWLERDGKHATDTNLVECLTKINRMDIVHLMETNTEPLQERISHSYAEIEQTITLDHSEGFSVLQEELCTAQHKQKEEQAVSKESETCDHPPIVSEEDISVGYSTFQDGVPKTEGDSSATALFPQTHKEQVQQDFSGKMQDLPEESSLEYQQEYFVTTPGTETSETQKAMIVPSSPSKTPEEVSTPAEEEKLYLQTPTSSERGGSPIIQEPEEPSEHREESSPRKTSLVIVESADNQPETCERLDEDAAFEKGDDMPEIPPETVTEEEYIDEHGHTVVKKVTRKIIRRYVSSEGTEKEEIMVQGMPQEPVNIEEGDGYSKVIKRVVLKSDTEQSEDNNE

SEQ ID NO: 100618 - protein, 56 aa, Homo sapiens
MDTMMLNVRNLFEQLVRRVEILSEGNENLSSWRRTLRISVKSGRGLTMSWGNTRIF

SEQ ID NO: 100619 - protein, 424 aa, Homo sapiens
MSDHGDVSLPPEDRVRALSQLGSAVEVNEDIPPRRYFRSGVEIIRMASIYSEEGNIEHAFILYNKYITLFIEKLPKHRDYKSAVIPEKKDTVKKLKEIAFPKAEELKAELLKRYTKEYTEYNEEKKKEAEELARNMAIQQELEKEKQRVAQQKQQQLEQEQFHAFEEMIRNQELEKERLKIVQEFGKVDPGLGGPLVPDLEKPSLDVFPTLTVSSIQPSDCHTTVRPAKPPVVDRSLKPGALSNSESIPTIDGLRHVVVPGRLCPQFLQLASANTARGVETCGILCGKLMRNEFTITHVLIPKQSAGSDYCNTENEEELFLIQDQQGLITLGWIHTHPTQTAFLSSVDLHTHCSYQMMLPESVAIVCSPKFQETGFFKLTDHGLEEISSCRQKGFHPHSKDPPLFCPRDCCGQSSDHHRPSMSV

SEQ ID NO: 100620 - protein, 144 aa, Homo sapiens
MWVFEETVNGRKLTDIINNDHENVKYLPGHKLPENVVAMSNLSEAVQDADLLVFVIPHQFIHRICDEITGRVPKKALGITLIKGIDEGPEGLKLISDIIREKMGIDISVLMGANIANEVAAEKFCETTIGSKVMENGLLFKELL

SEQ ID NO: 100621 - protein, 62 aa, Homo sapiens
MVEGDCQIQMGRFISFLQELSCFVTRCYEVVMNVVHQLAALYISNKIAPKIIETTGVHFQVF

SEQ ID NO: 100622 - protein, 168 aa, Homo sapiens
MKGWGWLALLLGALLGTAWARRSQDLHCGACRALVDELEWEIAQVDPKKTIQMGSFRINPDGSQSVVEVPYARSEAHLTELLEEICDRMKEYGEQIDPSTHRKNYVRVVGRNGESSELDLQGIRIDSDISGTLKFACESIVEEYEDELIEFFSREADNVKDKLCSKRT

SEQ ID NO: 100623 - protein, 1051 aa, Homo sapiens
MEVRASLQKVSGSSDSVATMNSEEFVLVPQYADDNSTKHEEKPQLKIVSNGDEQLEKAMEEILRDSEKRPSSLLVDCQSSSEISDHSFGDIPASQTNKPSLQLILDPSNTEISTPRPSSPGGLPEEDSVLFNKLTYLGCMKVSSPRNEVEALRAMATMKSSSQYPFPVTLYVPNVPEGSVRIIDQSSNVEIASFPIYKVLFCARGHDGTTESNCFAFTESSHGSEEFQIHVFSCEIKEAVSRILYSFCTAFKRSSRQVSDVKDSVIPTPDSDVFTFSVSLEVKEDDGKGNFSPVPKDRDKFYFKLKQGIEKKVVITVQQLSNKELAIERCFGMLLSPGRNVKNSDMHLLDMESMGKSYDGRAYVITGMWNPNAPVFLALNEETPKDKQVYMTVAVDMVVTEVVEPVRFLLETVVRVYPANERFWYFSRKTFTETFFMRLKQSEGKGHTNAGDAIYEVVSLQRESDKEEPVTPTSGGGPMSPQDDEAEEESDNELSSGTGDVSKDCPEKILYSWGELLGKWHSNLGARPKGLSTLVKSGVPEALRAEVWQLLAGCHDNQAMLDRYRILITKDSAQESVITRDIHRTFPAHDYFKDTGGDGQESLYKICKAYSVYDEDIGYCQGQSFLAAVLLLHMPEEQAFCVLVKIMYDYGLRDLYRNNFEDLHCKFYQLERLMQEQLPDLHSHFSDLNLEAHMYASQWFLTLFTAKFPLCMVFHIIDLLLCEGLNIIFHVALALLKTSKEDLLQADFEGALKFFRVQLPKRYRAEENARRLMEQACNIKVPTKKLKKYEKEYQTMRESQLQQEDPMDRYKRENRRLQEASMRLEQENDDLAHELVTSKIALRNDLDQAEDKADVLNKELLLTKQRLVETEEEKRKQEEETAQLKEVFRKQLEKAEYEIKKTTAIIAEYKQICSQLSTRLEKQQAASKEELEVVKGKMMACKHCSDIFSKEGALKLAATGREDQGIETDDEKDSLKKQLREMELELAQTKLQLVEAKCKIQELEHQRGALMNEIQAAKNSWFSKTLNSIKTATGTQPLQPAPVTQPPKEST

SEQ ID NO: 100624 - protein, 278 aa, Homo sapiens
MARRKPEGSSFNMTHLSMAMAFSFPPVASGQLHPQLGNTQHQTELGKELATTSTMPYQYPALTPEQKKELSDIAHRIVAPGKGILAADESTGSIAKRLQSIGTENTEENRRFYRQLLLTADDRVNPCIGGVILFHETLYQKADDGRPFPQVIKSKGGVVGIKVDKGVVPLAGTNGETTTQGLDGLSERCAQYKKDGADFAKWRCVLKIGEHTPSALAIMENANVLARYASICQQNGIVPIVEPEILPDGDHDLKRCQYVTEKVLAAVYKALSDHHIYL

SEQ ID NO: 100625 - protein, 123 aa, Homo sapiens
MQGTPGGGTRPGPSPVDRRTLLVFSFILAAALGQMNFTGDQVLRVLAKDEKQLSLLGDLEGLKPQKVDFWRGPARPSLPVDMRVPFSELKDIKAYLESHGLAYSIMIKDIQVLLDEERQAMAK

SEQ ID NO: 100626 - protein, 377 aa, Homo sapiens
MSVSVLSPSRLLGDVSGILQAASLLILLLLLIKAVQLYLHRQWLLKALQQFPCPPSHWLFGHIQELQQDQELQRIQKWVETFPSACPHWLWGGKVRVQLYDPDYMKVILGRSDPKSHGSYRFLAPWIGYGLLLLNGQTWFQHRRMLTPAFHYDILKPYVGLMADSVRVMLDKWEELLGQDSPLEVFQHVSLMTLDTIMKCAFSHQGSIQVDSLTSAGRWTHRACQLAHQHTDQVIQLRKAQLQKEGELEKIKRKRHLDFLDILLLAKMENGSILSDKDLRAEVDTFMFEGHDTTASGISWILYALATHPKHQERCREEIHSLLGDGASITWNHLDQMPYTTMCIKEALRLYPPVPGIGRELSTPVTFPDGRSLPKGV

SEQ ID NO: 100627 - protein, 439 aa, Homo sapiens
MAPWPPKGLVPAMLWGLSLFLNLPGPIWLQPSPPPQSSPPPQPHPCHTCRGLVDSFNKGLERTIRDNFGGGNTAWEEENLSKYKDSETRLVEVLEGVCSKSDFECHRLLELSEELVESWWFHKQQEAPDLFQWLCSDSLKLCCPAGTFGPSCLPCPGGTERPCGGYGQCEGEGTRGGSGHCDCQAGYGGEACGQCGLGYFEAERNASHLVCSACFGPCARCSGPEESNCLQCKKGWALHHLKCVDIDECGTEGANCGADQFCVNTEGSYECRDCAKACLGCMGAGPGRCKKCSPGYQQVGSKCLGESPADGTQAPGSASPSMNDVDECETEVCPGENKQCENTEGGYRCICAEGYKQMEGICVKEQIPESAGFFSEMTEDELVVLQQMFFGIIICALATLAAKGDLVFTAIFIGAVAAMTGYWLSERSDRVLEGFIKGR

SEQ ID NO: 100628 - protein, 60 aa, Homo sapiens
MLETYSSLVSLGHYITKPEMIFKLEQGAEPWIVEETPNLRLSAVQIIDDLIERSHESHDR

SEQ ID NO: 100629 - protein, 3874 aa, Homo sapiens
SDSNASFLRAARAGNLDKVVEYLKGGIDINTCNQNGLNALHLAAKEGHVGLVQELLGRGSSVDSATKKGNTALHIASLAGQAEVVKVLVKEGANINAQSQNGFTPLYMAAQENHIDVVKYLLENGANQSTATEDGFTPLAVALQQGHNQAVAILLENDTKGKVRLPALHIAARKDDTKSAALLLQNDHNADVQSKMMVNRTTESGFTPLHIAAHYGNVNVATLLLNRGAAVDFTARNGITPLHVASKRGNTNMVKLLLDRGGQIDAKTRDGLTPLHCAARSGHDQVVELLLERGAPLLARTKNGLSPLHMAAQGDHVECVKHLLQHKAPVDDVTLDYLTALHVAAHCGHYRVTKLLLDKRANPNARALNGFTPLHIACKKNRIKVMELLVKYGASIQAITESGLTPIHVAAFMGHLNIVLLLLQNGASPDVTNIRGETALHMAARAGQVEVVRCLLRNGALVDARAREEQTPLHIASRLGKTEIVQLLLQHMAHPDAATTNGYTPLHISAREGQVDVASVLLEAGAAHSLATKKGFTPLHVAAKYGSLDVAKLLLQRRAAADSAGKNGLTPLHVAAHYDNQKVALLLLEKGASPHATAKNGYTPLHIAAKKNQMQIASTLLNYGAETNIVTKQGVTPLHLASQEGHTDMVTLLLDKGANIHMSTKSGLTSLHLAAQEDKVNVADILTKHGADQDAHTKLGYTPLIVACHYGNVKMVNFLLKQGANVNAKTKNGYTPLHQAAQQGHTHIINVLLQHGAKPNATTANGNTALAIAKRLGYISVVDTLKVVTEEVTTTTTTITEKHKLNVPETMTEVLDVSDEEGDDTMTGDGGEYLRPEDLKELGDDSLPSSQFLDGMNYLRYSLEGGRSDSLRSFSSDRSHTLSHASYLRDSAVMDDSVVIPSHQVSTLAKEAERNSYRLSWGTENLDNVALSSSPIHSGFLVSFMVDARGGAMRGCRHNGLRIIIPPRKCTAPTRVTCRLVKRHRLATMPPMVEGEGLASRLIEVGPSGAQFLGPVIVEIPHFAALRGKERELVVLRSENGDSWKEHFCDYTEDELNEILNGMDEVLDSPEDLEKKRICRIITRDFPQYFAVVSRIKQDSNLIGPEGGVLSSTVVPQVQAVFPEGALTKRIRVGLQAQPMHSELVKKILGNKATFSPIVTLEPRRRKFHKPITMTIPVPKASSDVMLNGFGGDAPTLRLLCSITGGTTPAQWEDITGTTPLTFVNECVSFTTNVSARFWLIDCRQIQESVTFASQVYREIICVPYMAKFVVFAKSHDPIEARLRCFCMTDDKVDKTLEQQENFAEVARSRDVEVLEGKPIYVDCFGNLVPLTKSGQHHIFSFFAFKENRLPLFVKVRDTTQEPCGRLSFMKEPKSTRGLVHQAICNLNITLPIYTKESESDQEQEEEIDMTSEKNDETESTETSVLKSHLVNEVPVLASPDLLSEVSEMKQDLIKMTAILTTDVSDKAGSIKVKELVKAAEEEPGEPFEIVERVKEDLEKVNEILRSGTCTRDESSVQSSRSERGLVEEEWVIVSDEEIEEARQKAPLEITEYPCVEVRIDKEIKGKVEKDSTGLVNYLTDDLNTCVPLPKEQLQTVQDKAGKKCEALAVGRSSEKEGKDIPPDETQSTQKQHKPSLGIKKPVRRKLKEKQKQKEEGLQASAEKAELKKGSSEESLGEDPGLAPEPLPTVKATSPLIEETPIGSIKDKVKALQKRVEDEQKGRSKLPIRVKGKEDVPKKTTHRPHPAASPSLKSERHAPGSPSPKTERHSTLSSSAKTERHPPVSPSSKTEKHSPVSPSAKTERHSPASSSSKTEKHSPVSPSTKTERHSPVSSTKTERHPPVSPSGKTDKRPPVSPSGRTEKHPPVSPGRTEKRLPVSPSGRTDKHQPVSTAGKTEKHLPVSPSGKTEKQPPVSPTSKTERIEETMSVRELMKAFQSGQDPSKHKTGLFEHKSAKQKQPQEKGKVRVEKEKGPILTQREAQKTENQTIKRGQRLPVTGTAESKRGVRVSSIGVKKEDAAGGKEKVLSHKIPEPVQSVPEEESHRESEVPKEKMADEQGDMDLQISPDRKTSTDFSEVIKQELEDNDKYQQFRLSEETEKAQLHLDQVLTSPFNTTFPLDYMKDEFLPALSLQSGALDGSSESLKNEGVAGSPCGSLMEGTPQISSEESYKHEGLAETPETSPESLSFSPKKSEEQTGETKESTKTETTTEIRSEKEHPTTKDITGGSEERGATVTEDSETSTESFQKEATLGSPKDTSPKRQDDCTGSCSVALAKETPTGLTEEAACDEGQRTFGSSAHKTQTDSEVQESTATSDETKALPLPEASVKTDTGTESKPQGVIRSPQGLELALPSRDSEVLSAVADDSLAVSHKDSLEASPVLEDNSSHKTPDSLEPSPLKESPCRDSLESSPVEPKMKAGIFPSHFPLPAAVAKTELLTEVASVRSRLLRDPDGSAEDDSLEQTSLMESSGKSPLSPDTPSSEEVSYEVTPKTTDVSTPKPAVIHECAEEDDSENGEKKRFTPEEEMFKMVTKIKMFDELEQEAKQKRDYKKEPKQEESSSSSDPDADCSVDVDEPKHTGSGEDESGVPVLVTSESRKVSSSSESEPELAQLKKGADSGLLPEPVIRVQPPSPLPSSMDSNSSPEEVQFQPVVSKQYTFKMNEDTQEEPGKSEEEKDSESHLAEDRHAVSTEAEDRSYDKLNRDTDQPKICDGHGCEAMSPSSSAAPVSSGLQSPTGDDVDEQPVIYKESLALQGTHEKDTEGEELDVSRAESPQADCPSESFSSSSSLPHCLVSEGKELDEDISATSSIQKTEVTKTDETFENLPKDCPSQDSSITTQTDRFSMDVPVSDLAENDEIYDPQITSPYENVPSQSFFSSEESKTQTDANHTTSFHSSEVYSVTITSPVEDVVVASSSSGTVLSKESNFEGQDIKMESQQESTLWEMQSDSVSSSFEPTMSATTTVVGEQISKVIITKTDVDSDSWSEIREDDEAFEARVKEEEQKIFGLMVDRQSQGTTPDTTPARTPTEEGTPTSEQNPFLFQEGKLFEMTRSGAIDMTKRSYADESFHFFQIGQESREETLSEDVKEGATGADPLPLETSAESLALSESKETVDDEADLLPDDVSEEVEEIPASDAQLNSQMGISASTETPTKEAVSVGTKDLPTVQTGDIPPLSGVKQISCPDSSEPAVQVQLDFSTLTRSVYSDRGDDSPDSSPEEQKSVIEIPTAPMENVPFTESKSKIPVRTMPTSTPAPPSAEYESSVSEDFLSSVDEENKADEAKPKSKLPVKVPLQRVEQQLSDLDTSVQKTVAPQGQDMASIAPDNRSKSESDASSLDSKTKCPVKTRSYTETETESRERAEELELESEEGATRPKILTSRLPVKSRSTTSSCRGGTSPTKESKEHFFDLYRNSIEFFEEISDEASKLVDRLTQSEREQEIVSDDESSSALEVSVIENLPPVETEHSVPEDIFDTRPIWDESIETLIERIPDENGHDHAEDPQDEQERIEERLAYIADHLGFSWTELARELDFTEEQIHQIRIENPNSLQDQSHALLKYWLERDGKHATDTNLVECLTKINRMDIVHLMETNTEPLQERISHSYAEIEQTITLDHSEGFSVLQEELCTAQHKQKEEQAVSKESETCDHPPIVSEEDISVGYSTFQDGVPKTEGDSSATALFPQTHKEQVQQDFSGKMQDLPEESSLEYQQEYFVTTPGTETSETQKAMIVPSSPSKTPEEVSTPAEEEKLYLQTPTSSERGGSPIIQEPEEPSEHREESSPRKTSLVIVESADNQPETCERLDEDAAFEKVTLCEPSILSSTSQFQAEPVEGRRVSKVVKTTVVLGERMEKHLGDSSLATDLPSAKDDFEEDNNE

SEQ ID NO: 100630 - protein, 214 aa, Homo sapiens
MSDHGDVSLPPEDRVRALSQLGSAVEVNEDIPPRRYFRSGVEIIRMASIYSEEGNIEHAFILYNKYITLFIEKLPKHRDYKSAVIPEKKDTVKKLKEIAFPKAEELKAELLKRYTKEYTEYNEEKTHPTQTAFLSSVDLHTHCSYQMMLPESVAIVCSPKFQETGFFKLTDHGLEEISSCRQKGFHPHSKDPPLFCSCSHVTVVDRAVTITDLR

SEQ ID NO: 100631 - protein, 1060 aa, Homo sapiens
  MOD_RES (1)..(1): Any amino acid
XLDDRRPITLCVCVRARVCDLEPDDCASIYIFNVDPPPSTLTTPLCLPHHGLPSHSSVLSPSFQLQSHKNYEGTCEIPESKYSPLGGPKPFECPSIQITSISPNCHQELDAHEDDLQINDPEREFLERPSRDHLYLPLEPSYRESSLSPSPASSISSRSWFSDASSCESLSHIYDDVDSELNEAAARFTLGSPLTSPGGSPGGCPGEETWHQQYGLGHSLSPRQSPCHSPRSSVTDENWLSPRPASGPSSRPTSPCGKRRHSSAEVCYAGSLSPHHSPVPSPGHSPRGSVTEDTWLNASVHGGSGLGPAVFPFQYCVETDIPLKTRKTSEDQAAILPGKLELCSDDQGSLSPARETSIDDGLGSQYPLKKDSCGDQFLSVPSPFTWSKPKPGHTPIFRTSSLPPLDWPLPAHFGQCELKIEVQPKTHHRAHYETEGSRGAVKASTGGHPVVKLLGYNEKPINLQMFIGTADDRYLRPHAFYQVHRITGKTVATASQEIIIASTKVLEIPLLPENNMSASIDCAGILKLRNSDIELRKGETDIGRKNTRVRLVFRVHIPQPSGKVLSLQIASIPVECSQRSAQELPHIEKYSINSCSVNGGHEMVVTGSNFLPESKIIFLEKGQDGRPQWEVEGKIIREKCQGAHIVLEVPPYHNPAVTAAVQVHFYLCNGKRKKSQSQRFTYTPVLMKQEHREEIDLSSVPSLPVPHPAQTQRPSSDSGCSHDSVLSGQRSLICSIPQTYASMVTSSHLPQLQCRDESVSKEQHMIPSPIVHQPFQVTPTPPVGSSYQPMQTNVVYNGPTCLPINAASSQEFDSVLFQQDATLSGLVNLGCQPLSSIPFHSSNSGSTGHLLAHTPHSVHTLPHLQSMGYHCSNTGQRSLSSPVADQITGQPSSQLQPITYGPSHSGSATTASPAASHPLASSPLSGPPSPQLQPMPYQSPSSGTASSPSPATRMHSGQHSTQAQSTGQGGLSAPSSLICHSLCDPASFPPDGATVSIKPEPEDREPNFATIGLQDITLDDVNEIIGRDMSQISVSQGAGVSRQAPLPSPESLDLGRSDGL

SEQ ID NO: 100632 - protein, 96 aa, Homo sapiens
  MOD_RES (1)..(1): Any amino acid
XPGGAAGARSQGALPSGEVHHGGVKLGMRSIPIATACTIYHKFFCETNLDAYDPYLIAMSSIYLAGKVEEQHLRTRDIINVSNSTCSTTWFPSRTG

SEQ ID NO: 100633 - protein, 313 aa, Homo sapiens
MWAFSELPMPLLINLIVSLLGFVATVTLIPAFRGHFIAARLCGQDLNKTSRQQIPESQGVISGAVFLIILFCFIPFPFLNCFVKEQCKAFPHHEFVALIGALLAICCMIFLGFADDVLNLRWRHKLLLPTAASLPLLMVYFTNFGNTTIVVPKPFRPILGLHLDLGILYYVYMGLLAVFCTNAINILAGINGLEAGQSLVISASIIVFNLVELEGDCRDDHVFSLYFMIPFFFTTLGLLYHNWYPSRVFVGDTFCYFAGMTFAVVGILGHFSKTMLLFFMPQVFNFLYSLPQLLHIIPCPRHRIPRWQRASSW

SEQ ID NO: 100634 - protein, 77 aa, Homo sapiens
MAQLEGYYFSAALSCTFLVSCLLFSAFSRALREPYMDEIFHLPQAQRYLGSHDYYITWLVPGVNWSDQTCHLDLWMV

SEQ ID NO: 100635 - protein, 43 aa, Homo sapiens
MVLAVGVGVVGMVMGLRIRCDEGESLRGQTTSAFLFLGDPSEA

SEQ ID NO: 100636 - protein, 95 aa, Homo sapiens
MQLRGWQHAKGVPVPQGVMASMLLAQRLACSFQHSYRLLVPGSRHISQAAAKVDVEFDYDGPLMKTEVPGPRSQELMKQLNIIQNAEAVHFFCNY

SEQ ID NO: 100637 - protein, 503 aa, Homo sapiens
MLELQYHNEDLEKDKTSQNCLGRGMEQVAKKLGVAHEEIQRLTDELQVKEKEQCKLDSALKKAQLEIDKLKENLVKLKENDAADLQKAKEQNQRLDEEILALRNRVRSLDSEKKVLGEMVERLKGEVCESQENKQLGNHSPGKTVGGEQREQILKMSQEKNEMFESEWSKEREREKQLASGLDTAEKALKVESEHPSSGEKLKYNQQGEVQQLHQNLHRLQILCNSAENELRYERGQNLDLKQHNSLLQEENIKIKIELKHAQQKLLDSTKMCSSLTAEYKHCQQKIKELELEVLKHTQSIKSQNNLQEKLVQEKSKVADAEEKILDLQRKLEHAHKVCLTDTCISEKQQLEEKIKEATQNEAKVKQQYQEEQQKRKLLYQNVDELHRQVRTLQDKENLLEMTCSQQQSRIQQQEALLKQLENEKRKYDEHVKSNQELSEKLSKLQQEKEALREEYLRLLKLLNVHVRNYNEKHHQQKVKLQKVKYRLTNEVELRDKRINQFE

SEQ ID NO: 100638 - protein, 144 aa, Homo sapiens
MDSAITLWQFLLQLLQKPQNKHMICWTSNDGQFKLLQAEEVARLWGIRKNKPNMNYDKLSRALRYYYVKNIIKKVNGQKFVYKFVSYPEILNMDPMTVGRIEGDCESLNFSEVSSSSKDVENGGKDKPPQPGAKTSSRNDYIHS

SEQ ID NO: 100639 - protein, 130 aa, Homo sapiens
  MOD_RES (1)..(1): Any amino acid
XMLENWTRTSLEKQEQPHEDPERKGSLSNLMDFVKKTGICASKWEWGTTHNFLYKHGGIRDKIMSSRKHLHLVDAGLAINTPFPLVLPPTREVHLILSFDFSAGDPFEHPRSATSNELLCMSVSSAVKLG

SEQ ID NO: 100640 - protein, 3349 aa, Homo sapiens
MGVLKVWLGLALALAEFAVLPHHSEGACVYQDSLLADATIWKPDSCQSCRCHGDIVICKPAVCRNPQCAFEKGEVLQIAANQCCPECVLRTPGSCHHEKKIHEHGTEWASSPCSVCSCNHGEVRCTPQPCPPLSCGHQELAFIPEGSCCPVCVGLGKPCSYEGHVFQDGEDWRLSRCAKCLCRNGVAQCFTAQCQPLFCNQDETVVRVPGKCCPQCSARSCSAAGQVYEHGEQWSENACTTCICDRGEVRCHKQACLPLRCGKGQSRARRHGQCCEECVSPAGSCSYDGVVRYQDEMWKGSACEFCMCDHGQVTCQTGECAKVECARDEELIHLDGKCCPECISRNGYCVYEETGEFMSSNASEVKRIPEGEKWEDGPCKVCECRGAQVTCYEPSCPPCPVGTLALEVKGQCCPDCTSVHCHPDCLTCSQSPDHCDLCQDPTKLLQNGWCVHSCGLGFYQAGSLCLACQPQCSTCTSGLECSSCQPPLLMRHGQCVPTCGDGFYQDRHSCAVCHESCAGCWGPTEKHCLACRDPLHVLRDGGCESSCGKGFYNRQGTCSACDQSCDSCGPSSPRCLTCTEKTVLHDGKCMSECPGGYYADATGRCKVCHNSCASCSGPTPSHCTACSPPKALRQGHCLPRCGEGFYSDHGVCKACHSSCLACMGPAPSHCTGCKKPEEGLQVEQLSDVGIPSGECLAQCRAHFYLESTGICEACHQSCFRCAGKSPHNCTDCGPSHVLLDGQCLSQCPDGYFHQEGSCTECHPTCRQCHGPLESDCISCYPHISLTNGNCRTSCREEQFLNLVGYCADCHHLCQHCAADLHNTGSICLRCQNAHYLLLGDHCVPDCPSGYYAERGACKKCHSSCRTCQGRGPFSCSSCDTNLVLSHTGTCSTTCFPGHYLDDNHVCQPCNTHCGSCDSQASCTSCRDPNKVLLFGECQYESCAPQYYLDFSTNTCKECDWSCSACSGPLKTDCLQCMDGYVLQDGACVEQCLSSFYQDSGLCKNCDSYCLQCQGPHECTRCKGPFLLLEAQCVQECGKGYFADHAKHKCTACPQGCLQCSHRDRCHLCDHGFFLKSGLCVYNCVPGFSVHTSNETCSGKIHTPSLHVNGSLILPIGSIKPLDFSLLNVQDQEGRVEDLLFHVVSTPTNGQLVLSRNGKEVQLDKAGRFSWKDVNEKKVRFVHSKEKLRKGYLFLKISDQQFFSEPQLINIQAFSTQAPYVLRNEVLHISRGERATITTQMLDIRDDDNPQDVVIEIIDPPLHGQLLQTLQSPATPIYQFQLDELSRGLLHYAHDGSDSTSDVAVLQANDGHSFHNILFQVKTVPQNDRGLQLVANSMVWVPEGGMLQITNRILQAEAPGASAEEIIYKITQDYPQFGEVVLLVNMPADSPADEGQHLPDGRTATPTSTFTQQDINEGIVWYRHSGAPAQSDSFRFEVSSASNAQTRLESHMFNIAILPQTPEAPKVSLEASLHMTAREDGLTVIQPHSLSFINSEKPSGKIVYNITLPLHPNQGIIEHRDHPHSPIRYFTQEDINQGKVMYRPPPAAPHLQELMAFSFAGLPESVKFHFTVSDGEHTSPEMVLTIHLLPSDQQLPVFQVTAPRLAVSPGGSTSVGLQVVVRDAETAPKELFFELRRPPQHGVLLKHTAEFRRPMATGDTFTYEDVEKNALQYIHDGSSTREDSMEISVTDGLTVTMLEVRVEVSLSEDRGPRLAAGSSLSITVASKSTAIITRSHLAYVDDSSPDPEIWIQLNYLPSYGTLLRISGSEVEELSEVSNFTMEDINNKKIRYSAVFETDGHLVTDSFYFSVSDMDHNHLDNQIFTIMITPAENPPPVIAFADLITVDEGGRAPLSFHHFFATDDDDNLQRDAIIKLSALPKYGCIENTGTGDRFGPETASDLEASFPIQDVLENYIYYFQSVHESIEPTHDIFSFYVSDGTSRSEIHSINITIERKNDEPPRMTLQPLRVQLSSGVVISNSSLSLQDLDTPDNELIFVLTKKPDHGHVLWRQTASEPLENGRVLVQGSTFTYQDILAGLVGYVPSVPGMVVDEFQFSLTDGLHVDTGRMKIYTELPASDTPHLAINQGLQLSAGSVARITEQHLKVTDIDSDDHQVMYIMKEDPGAGRLQMMKHGNLEQISIKGPIRSFTQADISQGHVEYSHGTGEPGGSFAFKFDVVDGEGNRLIDKSFSISILEDKSPPVITTNKGLVLDENSVKKITTLQLSATDQDSGPTELIYRITRQPQLGHLEHAASPGIQISSFTQADLTSRNVQYVHSSEAEKHSDAFSFTLSDGVSEVTQTFHITLHPVDDSLPVVQNLGMRVQEGMRKTITEFELKAVDADTEAESVTFTIVQPPRHGTIERTSNGQHFHLTSTFTMKDIYQNRVSYSHDGSNSLKDRFTFTVSDGTNPFFIIEEGGKEIMTAAPQPFRVDILPVDDGTPRIVTNLGLQWLEYMDGKATNLITKKELLTMDPDTEDAQLVYEITTGPKHGFVENKLQPGRAAATFTQEDVNLGLIRYVLHKEKIREMMDSFQFLVKDSKPNVVSDNVFHIQWSLISFKYTSYNVSEKAGSVSVTVQRTGNLNQYAIVLCRTEQGTASSSSRVSSQPGQQDYVEYAGQVQFDEREDTKSCTIVINDDDVFENVESFTVELSMPAYALLGEFTQAKVIINDTEDEPTLEFDKKIYWVNESAGFLFAPIERKGDASSIVSAICYTVPKSAMGSSLYALESGSDFKSRGMSAASRVIFGPGVTMSTCDVMLIDDSEYEEEEEFEIALADASDNARIGRVATAKVLISGPNDASTVSLGNTAFTVSEDAGTVKIPVIRHGTDLSTFASVWCATRPSDPASATPGVDYVPSSRKVEFGPGVIEQYCTLTILDDTQYPVIEGLETFVVFLSSAQGAELTKPFQAVIAINDTFQDVPSMQFAKDLLLVKEKEGVLHVPITRSGDLSYESSVRCYTQSHSAQVMEDFEERQNADSSRITFLKGDKVKNCTVYIHDDSMFEPEEQFRVYLGLPLGNHWSGARIGKNNMATITISNDEDAPTIEFEEAAYQVREPAGPDAIAILNIKVIRRGDQNRTSKVRCSTRDGSAQSGVDYYPKSRVLKFSPGVDHIFFKVEILSNEDREWHESFSLVLGPDDPVEAVLGDVTTATVTILDQEAAGSLILPAPPIVVTLADYDHVEEVTKEGVKKSPSPGYPLVCVTPCDPHFPRYAVMKERCSEAGINQTSVQFSWEVAAPTDGNGARSPFETITDNTPFTSVNHMVLDSIYFSRRFHVRCVAKAVDKVGHVGTPLRSNIVTIGTDSAICHTPVVAGTSRGFQAQSFIATLKYLDVKHKEHPNRSGRWCLPPHID

SEQ ID NO: 100641 - protein, 84 aa, Homo sapiens
QSGTINSYEMRNAVNDAGFHLNNQLYDIITMRYADKHMNIDFDSFICCFVRLEGMFRAFHAFDKDGDGIIKLNVLEWLQLTMYA

SEQ ID NO: 100642 - protein, 255 aa, Homo sapiens
MEYMSTGSDNKEEIDLLIKHLNVSDVIDIMENLYASEEPAVYEPSLMTMCQDSNQNDERSKSLLLSGQEVPWLSSVRYGTVEDLLAFANHISNTAKHFYGQRPQESGILLNMVITPQNGRYQIDSDVLLIPWKLTYRNIGSDFIPRGAFGKVYLAQDIKTKKRMACKLIPVDQFKPSDVEIQACFRHENIAELYGAVLWGETVHLFMEAGEGGSVLEKLESCGPMREFEIIWVTKHVLKGLDFLHSKKVIHHDIK

SEQ ID NO: 100643 - protein, 434 aa, Homo sapiens
MNNHVSSKPSTMKLKHTINPILLYFIHFLISLYTILTYIPFYFFSESRQEKSNRIKAKPVNSKPDSAYRSVNSLDGLASVLYPGCDTLDKVFTYAKNKFKNKRLLGTREVLNEEDEVQPNGKIFKKVILGQYNWLSYEDVFVRAFNFGNGLQMLGQKPKTNIAIFCETRAEWMIAAQACFMYNFQLVTLYATLGGPAIVHALNETEVTNIITSKELLQTKLKDIVSLVPRLRHIITVDGKPPTWSEFPKGIIVHTMAAVEALGAKASMENQPHSKPLPSDIAVIMYTSGSTGLPKGVMISHSNIIAGITGMAERIPELGEEDVYIGYLPLAHVLELSAELVCLSHGCRIGYSSPQTLADQSSKIKKGSKGDTSMLKPTLMAAVPEIMDRIYKNVMNKVSEMSSFQRNLFILAYNYKMEQISKGRNTPLCDRWIL

SEQ ID NO: 100644 - protein, 224 aa, Homo sapiens
GLLVPLGILGPKGLALDTSVASSWFSTVRRTRSPPAPWACPGSGLGIVCYTWKGKRKLTIKTLVCHYAQRNDRSYWLASAAPLPMMPLSEEAIRPYVSRCAVCEAPAQAVAVHSQDQSIPPCPQTWRSLWIGYSFLMHTGAGDQGGGQALMSPGSCLEDFRAAPFLECQGRQGTCHFFANKYSFWLTTVKADLQFSSAPAPDTLKESQAQRQKISRCQVCVKYS

SEQ ID NO: 100645 - protein, 150 aa, Homo sapiens
MSTAREQPIFSTRAHVFQIDPATKRNWIPAGKHALTVSYFYDATRNVYRIISIGGAKAIINSTVTPNMTFTKTSQKFGQWADSRANTVYGLGFASEQHLTQFAEKFQEVKEAARLAREKSQDGGELTSPALGLASHQVPPSPLVSANGPG

SEQ ID NO: 100646 - protein, 53 aa, Homo sapiens
MFPDQPEKPLNLAHIVPPRPVTSMNDTLFSHSVPSSGSPFITRSSDGAFGGCV

SEQ ID NO: 100647 - protein, 78 aa, Homo sapiens
MATDSWALAVDEQEAAVKSMTNLQIKEEKVKADTNGIIKTSTTAEKTDEEEKGNHSFSRESMPWASIDPPRYKRTHYP

SEQ ID NO: 100648 - protein, 43 aa, Homo sapiens
MVGVQWRDLGLLQPPPPGFKQFSCLSLLSSWDYRGHCNLETWP

SEQ ID NO: 100649 - protein, 112 aa, Homo sapiens
GKLQKHQAFEAEVQANSGAIVKLDETGNLMISEGHFASETIRTFTPYRTAWRPIVTATHIGSHIRTRLMELHRQWELLLEKMREKGIKLLQAQKLVQYLRECEDVMDWINDK

SEQ ID NO: 100650 - protein, 665 aa, Homo sapiens
MEVTCLLLLALIPFHCRGQGVYAPAQAQIVHAGQACVVKEDNISERVYTIREGDTLMLQCLVTGHPRPQVRWTKTAGSASDKFQETSVFNETLRIERIARTQGGRYYCKAENGVGVPAIKSIRVDVQYLDEPMLTVHQTVSDVRGNFYQEKTVFLRCTVNSNPPARFIWKRGSDTLSHSQDNGVDIYEPLYTQGETKVLKLKNLRPQDYASYTCQVSVRNVCGIPDKAITFRLTNTTAPPALKLSVNETLVVNPGENVTVQCLLTGGDPLPQLQWSHGPGPLPLGALAQGGTLSIPSVQARDSGYYNCTATNNVGNPAKKTVNLLVRSMKNATFQITPDVIKESENIQLGQDLKLSCHVDAVPQEKVTYQWFKNGKPARMSKRLLVTRNDPELPAVTSSLELIDLHFSDYGTYLCMASFPGAPVPDLSVEVNISSETVPPTISVPKGRAVVTVREGSPAELQCEVRGKPRPPVLWSRVDKEAALLPSGLPLEETPDGKLRLERVSRDMSGTYRCQTARYNGFNVRPREAQVQLNVQFPPEVEPSSQDVRQALGRPVLLRCSLLRGSPQRIASAVWRFKGQLLPPPPVVPAAAEAPDHAELRLDAVTRDSSGSYECSVSNDVGSAACLFQVSATSCPRTTPTCCSGLRGSPTLSTLCSTTDSASAS

SEQ ID NO: 100651 - protein, 101 aa, Homo sapiens
MDSPCQPQPLSQALPQLPGSSSEPLEPEPGRARMGVESYLPCPLLPSYHCPGVPSEASAGSGTPRATATSTTASPLRDGFGGQDGGELRPLQSEGAAALVT

SEQ ID NO: 100652 - protein, 299 aa, Homo sapiens
  MOD_RES (1)..(1): Any amino acid
XGSIYYVDVQKFPLRMKDNDLLVSELYRDPAEDGVTALSVYLTPKTICADNNHVRTWSVTRFRGMISTQPGSTPLASFKILALESADGHGGCSAGNDIGPYGERDDQQVFIQKVVPSASQLFVRLSSTGQRVCSVRSVDGSPTTAFTVLECEGSRRLGSRPRRYLLTGQANGSLAMWDLTTAMDGLGQAPAGGLTEQELMEQLEHCELAPPAPSAPSWGCLPSPSPRISLTSLHSASSNTSLSGHRGSPSPPQAEARRRGGGSFVERCQELVRSGPDLRRPPTPAPWPSSGLGTPLTPP

SEQ ID NO: 100653 - protein, 14 aa, Homo sapiens
MSKAHKPWPYRRRS

SEQ ID NO: 100654 - protein, 339 aa, Homo sapiens
MQESQTKSMFVSRALEKILADKEVKRPQHSQLRRACQVALDEIKAEIEKQRLGTAAPPKANFIEADKYFLPFELACQSKSPRVVSTSLDCLQKLIAYGHITGNAPDSGAPGKRLIDRIVETICSCFQGPQTDEGVQLQIIKALLTAVTSPHIEIHEGTILQTVRTCYNIYLASKNLINQTTAKATLTQMLNVIFTRMENQVLQEARELEKPIQSKPQSPVIQAAAVSPKFVRLKHSQAQSKPTTPEKTDLTNGEHARSDSGKVSTENGDAPRERGSSLSGTDDGAQEVVKDILEDVVTSAIKGIGCTRTSSGCQVLPRSAEGCLPCVPLPVQAVHETPW

SEQ ID NO: 100655 - protein, 295 aa, Homo sapiens
MGTSASWAGGMGIKGQPEAAKSWRKPKQSNWCPYPMSKLVTLLALCKTEKFLIHSQQPCPQGAPDCQKVKVMYRMAHKPVYQVKQKVLTSLAWRCCPGYTGPNCEHHDSMAIPEPADPGDSHQEPQDGPVSFKPGHLAAVINEVEVQQEQQEHLLGDLQNDVHRVADSLPGLWKALPGNLTAAVMEANQTGHEFPDRSLEQVLLPHVDTFLQVHFSPIWRSFNQSLHSLTQAIRNLSLDVEANRQAISRVQDSAVARADFQELGAKFEAKVQENTQRVGQLRQDVEDRLHAQHFT

SEQ ID NO: 100656 - protein, 194 aa, Homo sapiens
MLAPCSGWELGCFRLCLRQVRLWAGAGRWACWACQARPYSSGGSERWPGSETEVPPPGPGRRTLKEWTLQVSPFGRLRARLPCHLAVRPLDPLTYPDGDRVLVAVCGVEGGVRGLDGLQVKYDEDLEEMAIVSDTIHPQASVEVNAPLKFGLDIKSSGSGCVKVQSIEGDNCKIETEHGTSILQSVKGQKLHVQ

SEQ ID NO: 100657 - protein, 43 aa, Homo sapiens
MAIRCTLVNCTCECFQPGKINLRTCDQCKHGWVAHETLKSCLQ

SEQ ID NO: 100658 - protein, 97 aa, Homo sapiens
MKGFIDDANYSVGLLDEGTNLGNVIDNYVYEHTLTGKNAFFVGDLGKIVKKHSQWQNVVAQIKPFYTVKCNSAPAVLEILAALGTGFACSSKNEMAL

SEQ ID NO: 100659 - protein, 523 aa, Homo sapiens
MSRDVCIHTWPCTYYLEPKRRWVTGQLSLTSLSLRFMTDSTGEILVSFPLSSIVEIKKEASHFIFSSITILEKGHAKHWFSSLRPSRNVVFSIIEHFWRELLLSQPGAVADASVPRTRGEELTGLMAGSQKRLEDTARVLHHQGQQLDSVMRGLDKMESDLEVADRLLTELESPAWWPFSSKLWKTPPETKPREDVSMTSCEPFGKEGILIKIPAVISHRTESHVKPGRLTVLVSGLEIHDSSSLLMHRFEREDVDDIKVHSPYEISIRQRFIGKPDMAYRLISAKMPEVIPILEVQFSKKMELLEDALVLRSARTSSPAEKSCSVWHAASGLMGRTLHREPPAGDQEGTALHLQTSLPALSEADTQELTQVRCPQCHASQRCVPVFPQAAPLAFLITNKLWVIHPYWPRTKEELLASTRQLQGGRKGSVRPRSTHFLEHNMHHIQTHSYAHTAALATTCTHCTCPCVCVHRCVCLPCMYMCMLCVVCMYCTHCAFVCSMCAMCTYVMHVLVLCMCMCMCVYL

SEQ ID NO: 100660 - protein, 115 aa, Homo sapiens
MPHDVSHTEADDDRTLYNLIVIRNQQAKDSEEWQKLNYDIHTLRQVRREVRNRWKCILEDLGFQKEADSLLSVTKLSTISDSKNTRKAREMLLKLAEETNIFPTSWELSERYLFV

SEQ ID NO: 100661 - protein, 3116 aa, Homo sapiens
MEDEERQKKLEAGKAKLAQFRQRKAQSDGQSPSKKQKKKRKTSSSKHDVSAHHDLNIDQSQCNEMYINSSQRVESTVIPESTIMRTLHSGEITSHEQGFSVELESEISTTADDCSSEVNGCSFVMRTGKPTNLLREEEFGVDDSYSEQGAQDSPTHLEMMESELAGKQHEIEELNRELEEMRVTYGTEGLQQLQEFEAAIKQRDGIITQLTANLQQARREKDETMREFLELTEQSQKLQIQFQQLQASETLRNSTHSSTAADLLQAKQQILTHQQQLEEQDHLLEDYQKKKEDFTMQISFLQEKIKVYEMEQDKKVENSNKEEIQEKETIIEELNTKIIEEEKKTLELKDKLTTADKLLGELQEQIVQKNQEIKNMKLELTNSKQKERQSSEEIKQLMGTVEELQKRNHKDSQFETDIVQRMEQETQRKLEQLRAELDEMYGQQIVQMKQELIRQHMAQMEEMKTRHKGEMENALRSYSNITVNEDQIKLMNVAINELNIKLQDTNSQKEKLKEELGLILEEKCALQRQLEDLVEELSFSREQIQRARQTIAEQESKLNEAHKSLSTVEDLKAEIVSASESRKELELKHEAEVTNYKIKLEMLEKEKNAVLDRMAESQEAELERLRTQLLFSHEEELSKLKEDLEIEHRINIEKLKDNLGIHYKQQIDGLQNEMSQKIETMQFEKDNLITKQNQLILEISKLKDLQQSLVNSKSEEMTLQINELQKEIEILRQEEKEKGTLEQEVQELQLKTELLEKQMKEKENDLQEKFAQLEAENSILKDEKKTLEDMLKIHTPVSQEERLIFLDSIKSKSKDSVWEKEIEILIEENEDLKQQCIQLNEEIEKQRNTFSFAEKNFEVNYQELQEEYACLLKVKDDLEDSKNKQELEYKSKLKALNEELHLQRINPTTVKMKSSVFDEDKTFVAETLEMGEVVEKDTTELMEKLEVTKREKLELSQRLSDLSEQLKQKHGEISFLNEEVKSLKQEKEQVSLRCRELEIIINHNRAENVQSCDTQVSSLLDGVVTMTSRGAEGSVSKVNKSFGEESKIMVEDKVSFENMTVGEESKQEQLILDHLPSVTKESSLRATQPSENDKLQKELNVLKSEQNDLRLQMEAQRICLSLVYSTHVDQVREYMENEKDKALCSLKEELIFAQEEKIKELQKIHQLELQTMKTQETGDEGKPLHLLIGKLQKAVSEECSYFLQTLCSVLGEYYTPALKCEVNAEDKENSGDYISENEDPELQDYRYEVQDFQENMHTLLNKVTEEYNKLLVLQTRLSKIWGQQTDGMKLEFGEENLPKEETEFLSIHSQMTNLEDIDVNHKSKLSSLQDLEKTKLEEQVQELESLISSLQQQLKETEQNYEAEIHCLQKRLQAVSESTVPPSLPVDSVVITESDAQRTMYPGSCVKKNIDGTIEFSGEFGVKEETNIVKLLEKQYQEQLEEEVAKVIVSMSIAFAQQTELSRISGGKENTASSKQAHAVCQQEQHYFNEMKLSQDQIGFQTFETVDVKFKEEFKPLSKELGEHGKEILLSNSDPHDIPESKDCVLTISEEMFSKDKTFIVRQSIHDEISVSSMDASRQLMLNEEQLEDMRQELVRQYQEHQQATELLRQAHMRQMERQREDQEQLQEEIKRLNRQLAQRSSIDNENLVSERERVLLEELEALKQLSLAGREKLCCELRNSSTQTQNGNENQGEVEEQTFKEKELDRKPEDVPPEILSNERYALQKANNRLLKILLEVVKTTAAVEETIGRHVLGILDRSSKSQSSASLIWRSEAEASVKSCVHEEHTRVTDESIPSYSGSDMPRNDINMWSKVTEEGTELSQRLVRSGFAGTEIDPENEELMLNISSRLQAAVEKLLEAISETSSQLEHAKVTQTELMRESFRQKQEATESLKCQEELRERLHEESRAREQLAVELSKAEGVIDGYADEKTLFERQIQEKTDIIDRLEQELLCASNRLQELEAEQQQIQEERELLSRQKEAMKAEAGPVEQQLLQETEKLMKEKLEVQCQAEKVRDDLQKQVKALEIDVEEQVSRFIELEQEKNTELMDLRQQNQALEKQLEKMRKFLDEQAIDREHERDVFQQEIQKLEQQLKVVPRFQPISEHQTREVEQLANHLKEKTDKCSELLLSKEQLQRDIQERNEEIEKLEFRVRELEQALLVEDRKHFGAVEAKPELSLEVQLQAERDAIDRKEKEITNLEEQLEQFREELENKNEEVQQLHMQLEIQKKESTTRLQELEQENKLFKDDMEKLGLAIKESDAMSTQDQHVLFGKFAQIIQEKEVEIDQLNEQVTKLQQQLKITTDNKVIEEKNELIRDLETQIECLMSDQECVKRNREEEIEQLNEVIEKLQQELANIGQKTSMNAHSLSEEADSLKHQLDVVIAEKLALEQQVETANEEMTFMKNVLKETNFKMNQLTQELFSLKRERESVEKIQSIPENSVNVAIDHLSKDKPELEVVLTEDALKSLENQTYFKSFEENGKGSIINLETRLLQLESTVSAKDLELTQCYKQIKDMQEQGQFETEMLQKKIVNLQKIVEEKVAAALVSQIQLEAVQEYAKFCQDNQTISSEPERTNIQNLNQLREDELGSDISALTLRISELESQVVEMHTSLILEKEQVEIAEKNVLEKEKKLLELQKLLEGNEKKQREKEKKRSPQDVEVLKTTTELFHSNEESGFFNELEALRAESVATKAELASYKEKAEKLQEELLVKETNMTSLQKDLSQVRDHLAEAKEKLSILEKEDETEVQESKKACMFEPLPIKLSKSIASQTDGTLKISSSNQTPQILVKNAGIQINLQSECSSEEVTEIISQFTEKIEKMQELHAAEILDMESRHISETETLKREHYVAVQLLKEECGTLKAVIQCLRSKEGSSIPELAHSDAYQTREICSSDSGSDWGQGIYLTHSQGFDIASEGRGEESESATDSFPKKIKGLLRAVHNEGMQVLSLTESPYSDGEDHSIQQVSEPWLEERKAYINTISSLKDLITKMQLQREAEVYDSSQSHESFSDWRGELLLALQQVFLEERSVLLAAFRTELTALGTTDAVGLLNCLEQRIQEQGVEYQAAMECLQKADRRSLLSEIQALHAQMNGRKITLKREQESEKPSQGSHCH

SEQ ID NO: 100662 - protein, 195 aa, Homo sapiens
METSRPEEERVGPRRTPGLSHEEIWAVVSSSSRPLPVHCPALTSRTWQASLFHHEQASREDKTFRGARCMEPSPERPACSQQEPTLGMDAMASEHRDVLVLLPSREQLRLAVGVKATGRELFQQVCNVASIRDAQFFGLCVVRNNEYIFMDLEQKLSKYFSKDWKKERNEGNEKPRAPFVAFLRVQHYVENGRVI

SEQ ID NO: 100663 - protein, 90 aa, Homo sapiens
MEFVTALVNLQEESSCPICLEYLKDPVTINCGHNFCRSCLSVSWKDLDDTFPCPVCRFCFPYKSFRRNPQLRNLTEIAKQLQIRRSKRKR

SEQ ID NO: 100664 - protein, 149 aa, Homo sapiens
MSECPLILYIHKHIDTYSQSYLFNDLFYPVYSGGRMVTYEHLREVVFGKSEDEHYPLWKSVIGGMMAGVIGQFLANPTDLVKVQMQMEGKRKLEGKPLRFRGVHHAFAKILAEGGIRGLWAGWVPNIQRAALVNMGDLTTYDTVKHYLV

SEQ ID NO: 100665 - protein, 52 aa, Homo sapiens
MSGRSVPHAHPATAEYEFANPSRLGEQRFGEGFFLLKLEAQVHGFIKRRFKS

SEQ ID NO: 100666 - protein, 225 aa, Homo sapiens
MGNAESQHVEHEFYGEKHASLGRKHTSRSLRLSHKTRRTRHASSGKVIHRNSEVSTRSSSTPSIPQSLAENGLEPFSQDGTLEDFGSPIWVDRVDMGLRPVSYTDSSVTPSVDSSIVLTAASVQSMPDTEESRLYGDDATYLAEGGRRQHSYTSNGPTFMETASFKKKRSKSADIWREDSLEFSLSDLSQEHLTSNEEILGSAEEKDCEEARGMETRASPRQLST

SEQ ID NO: 100667 - protein, 48 aa, Homo sapiens
MDLTGIESMDQCRHTLEQHNWNIEAAVQDRLNEQEGVPSVFNPPPSRP

SEQ ID NO: 100668 - protein, 76 aa, Homo sapiens
MAALGDIQESPSVPSPVSLSSPGTPGTQHHEPQLHLHGHQHGSPGSSPKVLSQPSDLDLQDVEEVEIGRDTFWPGE

SEQ ID NO: 100669 - protein, 700 aa, Homo sapiens
MGEPAGVAGTMESPFSPGLFHRLDEDWDSALFAELGYFTDTDELQLEAANETYENNFDNLDFDLDLMPWESDIWDINNQICTVKDIKAEPQPLSPASSSYSVSSPRSVDSYSSTQHVPEELDLSSSSQMSPLSLYGENSNSLSSAEPLKEDKPVTGPRNKTENGLTPKKKIQVNSKPSIQPKPLLLPAAPKTQTNSSVPAKTIIIQTVPTLMPLAKQQPIISLQPAPTKGQTVLLSQPTVVQLQAPGVLPSAQPVLAVAGGVTQLPNHVVNVVPAPSANSPVNGKLSVTKPVLQSTMRNVGSDIAVLRRQQRMIKNRESACQSRKKKKEYMLGLEARLKAALSENEQLKKENGTLKRQLDEVVSENQRLKVPSPKRRVVCVMIVLAFIILNYGPMSMLEQDSRRMNPSVSPANQRRHLLGFSAKEAQDTSDGIIQKNSYRYDHSVSNDKALMVLTEEPLLYIPPPPCQPLINTTESLRLNHELRGWVHRHEVERTKSRRMTNNQQKTRILQGALEQGSNSQLMAVQYTETTSSISRNSGSELQVYYASPRSYQDFFEAIRRRGDTFYVVSFRRVVCFLCAGIKSIHSVLSFTRSIAMHCRLGRDHLLLPATTHNKTTRPKMSIVLPAININENVINGQDYEVMMQIDCQVMDTRILHIKSSSVPPYLRDQQRNQTNTFFGSPPAATEATHVVSTIPESLQ

SEQ ID NO: 100670 - protein, 271 aa, Homo sapiens
MEAAAGVWGWGCLFRVPWRRPQAASVGLRTRLHARFSGRLWTWEPLNVPLRGGSEGGRFYASCVEPLTCTLQGPVGDGAACWRQGAWPQRWRREPGNLAGVRHIILVLSGKGGVGKSTISTELALALRHAGKKVGILDVDLCGPSIPRMLGAQGRAVHQCDRGWAPVFLDREQSISLMSVGFLLEKPDEAVVWRGPKKNALIKQFVSDVAWGELDYLVVDTPPGTSDEHMATIEALRPYQPLGALVVTTPQAVSVGDVRRELTFCRKTGLR

SEQ ID NO: 100671 - protein, 44 aa, Homo sapiens
MDHHCPWVNNCVGENNQKYFVLFTMYIALISLHALIMVGFHFLH

SEQ ID NO: 100672 - protein, 161 aa, Homo sapiens
  MOD_RES (1)..(1): Any amino acid
XNNCTCLRHSQSSLEKQELKKVNWNLQHGISSFSYWHQYTQREDFAVVVQPFFQNTLTPLNERGDTDLTFFSEDCFHFSDRGHAEMAIALWNNMESPYLYTLRNSRLLPDQAEEAPEVLYWAVPVAAGVGLVVGIIGTVVWRCRRGGRREDPPMSLRTVAL

SEQ ID NO: 100673 - protein, 181 aa, Homo sapiens
MCIEGSQGVAGCENPKPSLTDLVVLEHGLYAGDPVSKVLLKPLTGRTHQLRVHCSALGHPVVGDLTYGEVSGREDRPFRMMLHAFYLRIPTDTECVEVCTPDPFLPSLDACWSPHTLLQSLDQLVQALRATPDPDPEDRGPRPGSPSALLPGPGRPPPPPTKPPETEAQRGPCLQWLSEWT

SEQ ID NO: 100674 - protein, 159 aa, Homo sapiens
MGDEDWEAEINPHMSSYVPIFEKDRYSGENGDNFNRTPASSSEMDDGPSRRDHFMKSGFASGRNFGNRDAGECNKRDNTSTMGGFGVGKSFGNRGFSNSRFEDGDSSGFWRESSNDCEDNPTRNRGFSKRGGYRDGNNSEASGPYRRGGRGSFRGCRGG

SEQ ID NO: 100675 - protein, 110 aa, Homo sapiens
  MOD_RES (1)..(1): Any amino acid
XSGYVENPDKTAANIRGDFWLLGDRGIKDEDGYFQFMGRAFVILASQFLSHDPEQLTKELQQHVKSVTAPYKYPRKIEFVLNLPKTVTGKIQRTKLRDKEWKMSGKARAQ

SEQ ID NO: 100676 - protein, 29 aa, Homo sapiens
MLCWGNASFGQLGLGGIDEEIVLEPRKSD

SEQ ID NO: 100677 - protein, 463 aa, Homo sapiens
MASRLTLLTLLLLLLAGDRASSNPNATSSSSQDPESLQDRGEGKVATTVISKMLFVEPILEVSSLPTTNSTTNSATKITANTTDEPTTQPTTEPTTQPTIQPTQPTTQLPTDSPTQPTTGSFCPGPVTLCSDLESHSTEAVLGDALVDFSLKLYHAFSAMKKVETNMAFSPFSIASLLTQVLLGAGENTKTNLESILSYPKDFTCVHQALKGFTTKGVTSVSQIFHSPDLAIRDTFVNASRTLYSSSPRVLSNNSDANLELINTWVAKNTNNKISRLLDSLPSDTRLVLLNAIYLSAKWKTTFDPKKTRMEPFHFKNSVIKVPMMNSKKYPVAHFIDQTLKAKAIMEKLEMSKFQPTLLTLPRIKVTTSQDMLSIMEKLEFFDFSYDLNLCGLTEDPDLQVSAMQHQTVLELTETGVEAAAASAISVARTLLVFEVQQPFLFVLWDQQHKFPVFMGRVYDPRA

SEQ ID NO: 100678 - protein, 171 aa, Homo sapiens
MLAYNNGSRSGTSPFMDALTANGTTNIQTSVTGVTASKRKFIDDRRDQPFDKRLRFSVRQTESAYRYRDIVVRKQDGFTHILLSTKSSENNSLNPEVMREVQSALSTAAADDSKLVLLSAVGSVFCCGLDFIYFIRRLTDDRKRESTKMAEAIRNFVNTFIQFKKPIIVAV

SEQ ID NO: 100679 - protein, 16 aa, Homo sapiens
MAEEYHRESMLVEWEQ

SEQ ID NO: 100680 - protein, 1357 aa, Homo sapiens
FQARCRAYLVRKAFRHRLWAVLTVQAYARGMIARRLHQRLRAEYLWRLEAEKMRLAEEEKLRKEMSAKKAKEEAERKHQERLAQLAREDAERELKEKEAARRKKELLEQMERARHEPVNHSDMVDKMFGFLGTSGGLPGQEGQAPSGFEDLERGRREMVEEDLDAALPLPDEDEEDLSEYKFAKFAATYFQGTTTHSYTRRPLKQPLLYHDDEGDQLAALAVWITILRFMGDLPEPKYHTAMSDGSEKIPVMTKIYETLGKKTYKRELQALQGEGEAQLPEGQKKSSVRHKLVHLTLKKKSKLTEEVTKRLHDGESTVQGNSMLEDRPTSNLEKLHFIIGNGILRPALRDEIYCQISKQLTHNPSKSSYARGWILVSLCVGCFAPSEKFVKYLRNFIHGGPPGYAPYCEERLRRTFVNGTRTQPPSWLELQATKSKKPIMLPVTFMDGTTKTLLTDSATTAKELCNALADKISLKDRFGFSLYIALFDKVSSLGSGSDHVMDAISQCEQYAKEQGAQERNAPWRLFFRKEVFTPWHSPSEDNVATNLIYQQVVRGVKFGEYRCEKEDDLAELASQQYFVDYGSEMILERLLNLVPTYIPDREITPLKTLEKWAQLAIAAHKKGIYAQRRTDAQKVKEDVVSYARFKWPLLFSRFYEAYKFSGPSLPKNDVIVAVNWTGVYFVDEQEQVLLELSFPEIMAVSSSRGAKTTAPSFTLATIKGDEYTFTSSNAEDIRDLVVTFLEGLRKRSKYVVALQDNPNPGEESGFLSFAKGDLIILDHDTGEQVMNSGWANGINERTKQRGDFPTDSVYVMPTVTMPPREIVALVTMTPDQRQDVVRLLQLRTAEPEVRAKPYTLEEFSYDYFRPPPKHTLSRVMVSKARGKDRLWSHTREPLKQALLKKLLGSEELSQEACLAFIAVLKYMGDYPSKRTRSVNELTDQIFEGPLKAEPLKDEAYVQILKQLTDNHIRYSEERGWELLWLCTGLFPPSNILLPHVQRFLQSRKHCPLAIDCLQRLQKALRNGSRKYPPHLVEVEAIQHKTTQIFHKVYFPDDTDEAFEVESSTKAKDFCQNIATRLLLKSSEGFSLFVKIADKVLSVPENDFFFDFVRHLTDWIKKARPIKDGIVPSLTYQVFFMKKLWTTTVPGKDPMADSIFHYYQELPKYLRGYHKCTREEVLQLGALIYRVKFEEDKSYFPSIPKLLRELVPQDLIRQVSPDDWKRSIVAYFNKHAGKSKEEAKLAFLKLIFKWPTFGSAFFEVKQTTEPNFPEILLIAINKYGVSLIDPKTKDILTTHPFTKISNWSSGNTYFHITIGNLVRGSKLLCETSLGYKMDDLLTSYISQMLTAMSKQRGSRSGK

SEQ ID NO: 100681 - protein, 78 aa, Homo sapiens
MASFPPRVNEKEIAPAAPFDKKCGRENWTVAFAPDGSYFAWSQGHRTVKLVPWSQCLQNFLLHGTKNVTNSSSLRLPR

SEQ ID NO: 100682 - protein, 150 aa, Homo sapiens
MEALGFLKLEVNGPMVTVALSVALLALLKWYSTSAFSRLEKLGLRHPKPSPFIGNLTFFRQGFWESQMELRKLYGPLCGYYLGRRMFIVISEPDMIKQVLVENFSNFTNRMASGLEFKSVADSVLFLRDKRWEEVRGALMSAFSPEKLNE

SEQ ID NO: 100683 - protein, 131 aa, Homo sapiens; identical to SEQ ID NO: 43351

SEQ ID NO: 100684 - protein, 141 aa, Homo sapiens
MSQQKDFSPDEFNQFFVTPRSSVELPPYSGTVLCGTQAVDKLPDGQEYQRIEFGVDEVIEPSDTLPRTPSYSISSTLNPQAPEFILGCTASKITPDGITKEASYGSIDCQYPGSALALDGSSNVEAEVLENDGVSGGLGQR

SEQ ID NO: 100685 - protein, 140 aa, Homo sapiens
MMINLEARRLVLFVADGLRADALYELDENGNSRAPFIRNIIMHEGSWGISHTRVPTESRPGHVALIAGFYEDVSAVAKGWKENPVEFDSLFNESKYTWSWGSPDILPMFAKGASGDHVYTYSYDAKREDFGAQDATKLDT

SEQ ID NO: 100686 - protein, 132 aa, Homo sapiens
MPEGPELHLASQFVNEACRALVFGGCVEKSSVSRNPEVPFESSAYRISASARGKELRLILSPLPGAQPQQEPLALVFRFGMSGSFQLVPREELPRHAHLRFYTAPPGPRLALCFVDIRRFGRWDLGGKWQPG

SEQ ID NO: 100687 - protein, 174 aa, Homo sapiens
MINACRDFLELAEIHSRKWQRALQYEQEQRVHLEETIEQLAKQHNSLERAFHSAPGRPANPSKSFIEGSLLTPKGEDSEEDEDTEYFDAMEDSTSFITVITEAKEDSRKAEGSTGTSSVDWSSADNVLDGASLVPKGSSKVKRRVRIPNKPNYSLNLWSIMKNCIGRELSRIPM

SEQ ID NO: 100688 - protein, 71 aa, Homo sapiens
MDSARHHISHSTSAGPIPSQKEEEMTESQGTVTFKDVAIDFTQEEWKRLDPAQRKLYRNVMLENYNNLITV

SEQ ID NO: 100689 - protein, 150 aa, Homo sapiens
MTKDKEPIVKSFHFVCLMIIIVGTRIQFSDGNEFAVDKSKRGLIHVPKDLPLKTKVLDMSQNYIAELQVSDMSFLSELTVLRLSHNRIQLLDLSVFKFNQDLEYLDLSHNQLQKISCHPIVSFRHLDLSFNDFKALPICKEFGNLSQLNF

SEQ ID NO: 100690 - protein, 118 aa, Homo sapiens
MSVSGLKAELKFLASIFDKNHERFRIVSWKLDELHCQFLVPQQGSPHSLPPPLTLHCNITESYPSSSPIWFVDSEDPNLTSVLERLEDTKNNNLDNFPFDPPFVRVVLPVLSGGINII

SEQ ID NO: 100691 - protein, 100 aa, Homo sapiens
MESVALYSFQATESDELAFNKGDTLKILNMEDDQNWYKAELRGVEGFIPKNYIRVKPHPWYSGRISRQLAEEILMKRNHLGAFLIRESESSPGEFSVSVK

SEQ ID NO: 100692 - protein, 100 aa, Homo sapiens
  MOD_RES (1)..(1): Any amino acid
XQLLDANQTVLDKFSAVPDPIPQWNNNACLHRHSFTMLPGLVLNSCAQAILSPQPPTVLGLQAQATASSPCVFLSAPIPALRLTRWNLTLSPRLECNGTI

SEQ ID NO: 100693 - protein, 320 aa, Homo sapiens
MRGSVECTWGWGHCAPSPLLLWTLLLFAAPFGLLGEKTRQLLEFDSTNVSDTAAKPLGRPYPPYSLADFSWNNITDSLDPATLSATFQGHPMNDPTRTFANGSLAFRVQAFSRSSRPAQPPRLLHTADTCQLEVALIGASPRGNRSLFGLEVATLGQGPDCPSMQEQHSIDDEYAPAVFQLDQLLWGSLPSGFAQWRPVAYSQKPGGRESALPCQASPLHPALAYSLPQSPIVRAFFGSQNNFCAFNLTFGASTGPGYWDQHYLSWSMLLGVGFPPVDGLSPLVLGIMAVALGAPGLMLLGGGLVLLLHHKKYSEYQSIN

SEQ ID NO: 100694 - protein, 318 aa, Homo sapiens
  MOD_RES (1)..(1): Any amino acid
XFHSPMLAFEFIQFCRDNLHLFSGHLSTLRLSFPNLFKFLAWNSPPLTSEFVALLPALVDAGTALEMLHALLDLPCLTAVLDLQLRSAPAASERPLWDTSLRAPSCLEAFRDPQFQGLFQYLLRPKASGATERLAPLHQLLQPMAGCARVAQCAQAVPTLLQAFFSAVTQVADGSLINQLALLLLGRSDSLYPAPGYAAGVHRCPPQVVTVLMTTLTKLASRSQDLIPRASLLLSKMRTLAHSPATSSTHSEEGAEAIRTRATELLTLLKMPSVAQFVLTPSTEVCSPRYHRDANTALPLALRTVSRLVEREAGLMPG

SEQ ID NO: 100695 - protein, 118 aa, Homo sapiens
MASGQLGGSLSSNHVEESCCCSTPGLGLSSPGPAGKGCRRRTRARPVPFLPNSTEEAQTPLAWTSPPELVDHYRSVSELWSLLPAPQRLNLPPTSSRSETQHRGSAPHSESDLPEQEE

SEQ ID NO: 100696 - protein, 169 aa, Homo sapiens
MQNSEGGADSPASVALRPSAAAPPVPASPQVQPVQHVYPAQVQYVEGGDAVYTNGAIRTAYTYNPEPQMYAPSSTASYFEAPGGAQVTVAASSPPAVPSHSMVGITMDVGGSPIVSSAGAYLIHGGMDSTRHSLAHTSRSSPATLEMAIENLQKSEGITSHKSGLLNSH

SEQ ID NO: 100697 - protein, 41 aa, Homo sapiens
MFPPSGSTGLIPPSHFQARPLSTLPRMAPTWLSDIPLVQPP

SEQ ID NO: 100698 - protein, 127 aa, Homo sapiens
MATGLLRAKKEEEWRLLSPAQRTLHREVMLETYNHLVSLEIPSSKPKLIAQLERGEAPWREERKCPLDLCPAESKPEIQLSPSCPLIFSSQQALSQHVWLSHLSQLFSSLWAGNPLHLGKHYPEDQK

SEQ ID NO: 100699 - protein, 8 aa, Homo sapiens
MLLELAGQ

SEQ ID NO: 100700 - protein, 119 aa, Homo sapiens
MSLKSERRGIHVDQSDLLCKKGCGYYGNPAWQGFCSKCWREEYHKARQKQIQEDWELAERLQREEEEAFASSQSSQGAQSLTFSKFEEKKTNEKTRKVTTVKKFFSASSRVGSKKGSKH

SEQ ID NO: 100701 - protein, 177 aa, Homo sapiens
MDTSTNLDIGAQLIVEECPSTYSLTGMPDIKIEHPLDPNSEEGSAQGVAMGMKFILPNRFDMNVCSRFVKSLNEEDSKNIQDQVNSDLEVASVLFKALSVHQLAAQGEMLYLATRIEQENVINHTDEEGFTPLMWAAAHGQIAVVEFLLQNGADPQLLGKGRESALSLACSKGYTDI

SEQ ID NO: 100702 - protein, 122 aa, Homo sapiens
MTPKDDIRLVGELVTVIGAIIILLVEVPDIFRMGVTRFFGQTILGGPFHVLIITYAFMVLVTMVMRLISASGEVVPMSFALVLGWCNVMYFARGFQMLGPFTIMIQKMIFGDLMRFCWLMAV

SEQ ID NO: 100703 - protein, 299 aa, Homo sapiens
MKPILLQGHERSITQIKYNREGDLLFTVAKDPIVNVWYSVNGERLGTYMGHTGAVWCVDADWDTKHVLTGSADNSCRLWDCETGKQLALLKTNSAVRTCGFDFGGNIIMFSTDKQMGYQCFVSFFDLRDPSQIDNNEPYMKIPCNDSKITSAVWGPLGECIIAGHESGELNQYSAKSGEVLVNVKEHSRQINDIQLSRDMTMFVTASKDNTAKLFDSTTLEHQKTFRTERPVNSAALSPNYDHVVLGGGQEAMDVTTTSTRIGKFEARFFHLAFEEEFGRVKGHFGPINSVAFHPDGKR

SEQ ID NO: 100704 - protein, 140 aa, Homo sapiens
  MOD_RES (1)..(1): Any amino acid
XGFEQAIKRKHAVLCQQKLEQKLEAQHRSLQRTLNELKEYQKQHDHYLRQQEILEKHKLIQEEQILRNIIHETQMAKEAQLGNHQICRLVNQQHSLHCQWDQPVRYHRGDIFENVDYVQVFFLVQSNSYKRLLYKDFLKL

SEQ ID NO: 100705 - protein, 53 aa, Homo sapiens
MAAPSGGVNCEEFAEFQLKWMQSELNVEEVVNDRSWKVFNERCRIHFKPPKNE

SEQ ID NO: 100706 - protein, 587 aa, Homo sapiens
MLFPLQVAAVTSSVRDDPLEHCVSPRTRARSPEICKMADNLDEFIEEQKARLAEDKAELESDPPYMEMKGKLSAKLSENSKILISMAKENIPPNSQQTRGSLGIDYGLSLPLGEDYERKKHKLKEELRQDYRRYLTQPKSQRNKKPIGQVKPDLTSQIQTSCENSEGPRKDVLTPSEAYEELLNQRRLEEDRYRQLDDEIELRNRRIIKKANEEVGISNLKHQRFASKAGIPDRRFHRFNEDRVFDRRYHRPDQDPEVSEEMDERFRYESDFDRRLSRVYTNDRMHRNKRGNMPPMEHDGDVIEQSNIRISSAENKSAPDNETSKSANQDTCSPFAGMLFGGEDRELIQRRKEKYRLELLEQMAEQQRNKRREKDLELRVAASGAQDPEKSWNELLTSLQLSKEEPDRLKQFSVAPRHFEEMIPPERPRIAFQTPLPPLSAPSVPPIPSVHPVPSQNEDLRSGLSSALGEMVSPRIAPLPPPPLLPPLATNYRTPYDDAYYFYGSRNTFDPSLAYYGSGMMGVQPAAYVSAPVTHQLAQPVVNTVGQNELKITSDQVINSGLIFEDKPKPSKQSLQSYQEALQQQLI

SEQ ID NO: 100707 - protein, 129 aa, Homo sapiens
MPKKDARTLLARFNEQIEPIYALLRETEDVNLAYEILEPEPTEIPALKQSKDHAATTAGAASLAGGHHREAWATKGPSYEDLYTQNVVINMDDQEDLHRASLEGKSAKERPIWLRESTVQGAYGSEDMK

SEQ ID NO: 100708 - protein, 235 aa, Homo sapiens
SPRHATHKHYMTREADEYYRKKLLIQMKSIWKKKQKNQRNLNRETNIIGTWEDLGDVMKRNEFLRLAMPQPVNPQLSAWTITGVSERLNFFRVYITLDRKICSNHKLLFEDLRHLQCSLDDTDMSCNPTSTQYTSSWGAQILSSGKHYWEVDVKDSCNWVIGLCREAWTKRNDMRLDSEGIFLLLCLKVDDHFSLFSTSPLLPHYIPRPQGWLGVFLDYECGIVSFVNVAQSSLI

SEQ ID NO: 100709 - protein, 594 aa, Homo sapiens
MGSLLALLALLLLWGAVAEGPAKKVLTLEGDLVLGGLFPVHQKGGPAEDCGPVNEHRGIQRLEAMLFALDRINRDPHLLPGVRLGAHILDSCSKDTHALEQALDFVRASLSRGADGSRHICPDGSYATHGDAPTAITGVIGGSYSDVSIQVANLLRLFQIPQISYASTSAKLSDKSRYDYFARTVPPDFFQAKAMAEILRFFNWTYVSTVASEGDYGETGIEAFELEARARNICVATSEKVGRAMSRAAFEGVVRALLQKPSARVAVLFTRSEDARELLAASQRLNASFTWVASDGWGALESVVAGSEGAAEGAITIELASYPISDFASYFQSLDPWNNSRNPWFREFWEQRFRCSFRQRDCAAHSLRAVPFEQESKIMFVVNAVYAMAHALHNMHRALCPNTTRLCDAMRPVNGRRLYKDFVLNVKFDAPFRPADTHNEVRFDRFGDGIGRYNIFTYLRAGSGRYRYQKTRKCPENFNEAKFIGFTMYTTCIIWLAFLPIFYVTSSDYRVQTTTMCVSVSLSGSVVLGCLFAPKLHIILFQPQKNVVSHRAPTSRFGSAAARASSSLGQGSGSQFVPTVCNGREVVDSTTSSL

SEQ ID NO: 100710 - protein, 71 aa, Homo sapiens
MSPAPRPPRCLLLPLLTLGTALASLGSAQSSSFSPESLEELYNWGELPLPRFPWALLSALEPPDKHLDSAQ

SEQ ID NO: 100711 - protein, 42 aa, Homo sapiens
VLTEPVSKWRNVRGHNPLVSSVRLMERSIHSARYIFVENLYR

SEQ ID NO: 100712 - protein, 677 aa, Homo sapiens
MEPIYPFARPQMNTRFPSSRMVPFHFPPSKCALWNPTPTGDFIYLHLSYYRNPKLVVTEKTIRLAYRHAKQNKKNSSCFLLGSLTADEDEEGVTLTVDRFDPGREVPECLEITPTASLPGDFLIPCKVHTQELCSREMIVHSVDDFSSALKALQCHICSKDSLDCGKLLSLRVHITSRESLDSVEFDLHWAAVTLANNFKCTPVKPIPIIPTALARNLSSNLNISQVQGTYKYGYLTMDETRKLLLLLESDPKVYSLPLVGIWLSGITHIYSPQVWACCLRYIFNSSVQERVFSESGNFIIVLYSMTHKEPEFYECFPCDGKIPDFRFQLLTSKETLHLFKNVEPPDKNPIRCELSAESQNAETEFFSKASKNFSIKRSSQKLSSGKMPIHDHDSGVEDEDFSPRPIPSPHPVSQKISKIQPSVPELSLVLDGNFIESNPLPTPLEMVNNENPPLINHLEHLKPLQPQLYDEKHSPEVEAGEPSLRGIPNQLNQDKPALLRHCKPCTVCMHTPKTESDNGMMGLSPDAYRFLTEQDRQLRLLQAQIQRLLEAQSLMPCSPKTTAVEDTVQAGRQMELVSVEAQSSPGLHMRKGVSIAVSTGASLFWNAAGEDQEPDSQMKQDDTKISSEDMNFSVDINNEVTSLPGSASSLKAVDIPSFEESNIAVEEEFNQPLSVS

SEQ ID NO: 100713 - protein, 146 aa, Homo sapiens
MDPFHACSILKQLKTMYDEGQLTDIVVEVDHGKTFSCHRNVLAAISPYFRSMFTSGLTESTQKEVRIVGVEAESMDLVLNYAYTSRVILTEANVQALFTAASIFQIPSIQDQCAKYMISHLDPQNSIGVFIFADHYGHQELGDRSK

SEQ ID NO: 100714 - protein, 230 aa, Homo sapiens
  MOD_RES (1)..(1): Any amino acid
XSKGFGFVTFENSADADRAREKLHGTVVEGRKIEVNNATARVMTNKKMVTPYANGWKLSPVVGAVYGPELYAASSFQADVSLGNDAAVPLSGRGGINTYIPLIIPGFPYPTAATTAAAFRGAHLRGRGRTVYGAVRAVPPTAIPAYPGIVLQEPIISAKIPQGGYAAYRYAQPATATAATAAAAAAAAYSDGYGRVYTADPYHALAPAASYGVGAVASLYRGGYSRFAPY

SEQ ID NO: 100715 - protein, 149 aa, Homo sapiens
MEESPLSRAPSRGGVNFLNVARTYIPNTKVECHYTLPPGTMPSASDWIGIFKVEAACVRDYHTFVWSSVPESTTDGSPIHTSVQFQASYLPKPGAQLYQFRYVNRQGQVCGQSPPFQFREPRPMDELVTLEEADGGSDILLVVPKATVL

SEQ ID NO: 100716 - protein, 147 aa, Homo sapiens
MGLPEERVRSGSGSRGQEEAGAGGRARSWSPPPEVSRSAHVPSLQRYRELHRRSVEEPREFYWKTPCPGPFLRYNFDVTKGKIFIEWMKGATTNICYNVLDRNVHEKKLGDKVAFYWEGNEPGETTQITYHQLLVQVCQFSNVLRKQ

SEQ ID NO: 100717 - protein, 143 aa, Homo sapiens
NDIHVAMEENVFWECKANGRPKPTYKWLKNGEPLLTRDRIQIEQGTLNITIVNLSDAGMYQCLAENKHGVIFSNAELSVIAVGPDFSRTLLKRVTLVKVGGEVVIECKPKASPKPVYTWKKGRDILKENESVHQGFGSGSAPL

SEQ ID NO: 100718 - protein, 62 aa, Homo sapiens
MSKKISGGSVVEMQGDEMTRIIWELIKEKLIFPYVELDLHSYDLGIENRDATNDQVTKDAAE

SEQ ID NO: 100719 - protein, 133 aa, Homo sapiens
MDIPLDLSSSAGSGKRRRRGNLPKESVQILRDWLYEHRYNAYPSEQEKALLSQQTHLSTLQVCNWFINARRRLLPDMLRKDGKDPNQFTISRRGAKISETSSVESVMGIKNFMPALEETPFHSCTAGPNPTLG

SEQ ID NO: 100720 - protein, 109 aa, Homo sapiens
MATKEKLQCLKDFHKDILKPSPGKSPGTRPEDEAEGKPPQREKWSSKIDFVLSVAGGFVGLGNVWRFPYLCYKNGGGAFLIPYFIFLFGSGLPVFFLEIIIGQYTSEGG

SEQ ID NO: 100721 - protein, 83 aa, Homo sapiens
MQSEIAMDRMKKIKRQLSMTLRGGRGIDKTNGAPEQIGLDESGGGGGSDPGEAPTRAAPGELRSARGPLSSAPDCARGLEDGV

SEQ ID NO: 100722 - protein, 232 aa, Homo sapiens
MESQEPTESSQNGKQYIISEELISEGKWVKLEKTTYMDPTGKTRRNKEKTTTLLILRTWESVKRTTRKEQTADGVAVIPVLQRTLHYECIVLVKQFRPPMGGYCIEFPAGLIDDGETPEAAALRELEEETGYKGDIAECSPAVCMDPGLSNCTIHIVTVTINGDDAENARPKPKPGDGEFVEVISLPKNDLLQRLDALVAEEHLTVDARVYSYALALKHANAKPFEVPFLKF

SEQ ID NO: 100723 - protein, 119 aa, Homo sapiens
  MOD_RES (1)..(1): Any amino acid
XVVVRRLAVRRFGSRSLSTADMTKGLVLGIYSKEKEDDVPQFTSAGENFDKLLAGKLRETLNISGPPLKAGKTRTFYGLHQRGAGRFKTWSSRLWRWIPVETLRLLRRERCLVSMNTMT

SEQ ID NO: 100724 - protein, 470 aa, Homo sapiens
MLDFAIFAVTFLLALVGAVLYLYPASRQAAGIPGITPTEEKDGNLPDIVNSGSLHEFLVNLHERYGPVVSFWFGRRLVVSLGTVDVLKQHINPNKTSDPFETMLKSLLRYQSGGGSVSENHMRKKLYENGVTDSLKSNFALLLKLSEELLDKWLSYPETQHVPLSQHMLGFAMKSVTQMVMGSTFEDDQEVIRFQKNHGTLCIFTYFQVWSEIGKGFLDGSLDKNMTRKKQYEDALMQLESVLRNIIKERKGRNFSQHIFIDSLVQGNLNDQQILEDSMIFSLASCIITAKLCTWAICFLTTSEEVQKKLYEEINQVFGNGPVTPEKIEQLRYCQHVLCETVRTAKLTPVSAQLQDIEGKIDRFIIPRETLVLYALGVVLQDPNTWPSPHKFDPDRFDDELVMKTFSSLGFSGTQECPELRFAYMVTTVLLSVLVKRLHLLSVEGQVIETKYELVTSSREEAWITVSKRY

SEQ ID NO: 100725 - protein, 264 aa, Homo sapiens
MADIDNKEQSELDQDLDDVEEVEEEETGEETKLKARQLTVQMMQNPQILAALQERLDGLVETPTGYIESLPRVVKRRVNALKNLQVKCAQIEAKFYEEVHDLERKYAVLYQPLFDKRFEIINAIYEPTEEECEWKPDEEDEISEELKEKAKIEDEKKDEEKEDPKGIPEFWLTVFKNVDLLSDMVQEHDEPILKHLKDIKVKFSDAGQPMSFVLEFHFEPNEYFTNEVLTKTYRMRSEPDDSDPFSFDGPEIMGCTGCQIDWKK

SEQ ID NO: 100726 - protein, 268 aa, Homo sapiens
  MOD_RES (1)..(1): Any amino acid
XKFKQAETLYKEILTRAHEREFGSVDDENKPIWMHAEEREECKGKQKDGTSFGEYGGWYKACKVDSPTVTTTLKNLGALYRRQGKFEAAETLEEAAMRSRKQRSISEIPKKILSANGSNHFPLPGSQGLDNVHKQRVAEVLNDPENMEKRRSRESLNVDVVKYESGPDGGEEVSMSVEWNGDGTGSLKRSGSFSKLRASIRRSSEKLVRKLKGGSSRESEPKNPGMKRASSLNVLNVGGKAAEDRFQERNNCLADSRALSASHTDLAH

SEQ ID NO: 100727 - protein, 43 aa, Homo sapiens
MEKAVNDGSHSEELFCHLKTISEKEDLPRCTSESHLSWRIFLH

SEQ ID NO: 100728 - protein, 672 aa, Homo sapiens
MFQDSVAFEDVAVTFTQEEWALLDPSQKNLCRDVMQETFRNLASIGKKWKPQNIYVEYENLRRNLRIVGERLFESKEGHQHGEILTQVPDDMLKKTTTGVKSCESSVYGEVGSAHSSLNRHIRDDTGHKAYEYQEYGQKPYKCKYCKKPFNCLSSVQTHERAHSGRKLYVCEECGKTFISHSNLQRHRIMHRGDGPYKCKFCGKALMFLSLYLIHKRTHTGEKPYQCKQCGKAFSHSSSLRIHERTHTGEKPYKCNECGKAFHSSTCLHAHKRTHTGEKPYECKQCGKAFSSSHSFQIHERTHTGEKPYECKECGKAFKCPSSVRRHERTHSRKKPYECKHCGKVLSYLTSFQNHLGMHTGEISHKCKICGKAFYSPSSLQTHEKTHTGEKPYKCNQCGKAFNSSSSFRYHERTHTGEKPYECKQCGKAFRSASLLQTHGRTHTGEKPYACKECGKPFSNFSFFQIHERMHREEKPYECKGYGKTFSLPSLFHRHERTHTGGKTYECKQCGRSFNCSSSFRYHGRTHTGEKPYECKQCGKAFRSASQLQIHGRTHTGEKPYECKQCGKAFGSASHLQMHGRTHTGEKPYECKQCGKSFGCASRLQMHGRTHTGEKPYKCKQCGKAFGCPSNLRRHGRTHTGEKPYKCNQCGKVFRCSSQLQVHGRAHCIDTP

SEQ ID NO: 100729 - protein, 44 aa, Homo sapiens
  MOD_RES (1)..(1): Any amino acid
XGNPFFGRWGTGRCKPAHHKPVDKCPGVQEMARTPRWRPDHPRG

SEQ ID NO: 100730 - protein, 101 aa, Homo sapiens
MVTSSFPISVAVFALITLQVGTQDSFIAAVYEHAVILPNKTETPVSQEDALNLMNENIDILETAIKQAAEQGARIIVTPEDALYGWKFTRETVFPYLEDIP

SEQ ID NO: 100731 - protein, 99 aa, Homo sapiens
MAEGDNRSTNLLAAETASLEEQLQGWGEVMLMADKVLRWERAWFPPAIMGVVSLVFLIIYYLDPSVLSGVSCFVMFLCLADYLVPILAPRIFGSNKCTS

SEQ ID NO: 100732 - protein, 157 aa, Homo sapiens
MSPDFIPSQPEGVYLKYREPEKYIELDGDRLTTEDLVNLGKGRYKIKLTPTAEKRVQKSREVIDSIIKEKTVVYGITTGFGKFARTVIPINKLQELQVNLVRSHSSGVGKPLSPERCRMLLALRINVLAKGYSGISLETLKQVIEMFNASCLPYVPE

SEQ ID NO: 100733 - protein, 139 aa, Homo sapiens
  MOD_RES (1)..(1): Any amino acid
XREDEQIRGITMKSSAISLHYATGNEEYLINLIDSPGHVDFSSEVSTAVRICDGCIIVVDAVEGVCPQINALTGTLFTSKVLEERAERETESQVNPNSEQGEQVYDWSTGLEDTDDSHLYFSPEQGNVVFTSAIDGWGF

SEQ ID NO: 100734 - protein, 119 aa, Homo sapiens
MNGICRVRARGGERRKGGEICRLPLALGLDVNIYYVCLFSPRRWLRPRRPPTRSPAEQSPEAEFLRRLLIRLPPAPKTCCRPRGSALGRLVCWEPASDNRFGVLIACSSSPPWAIVGGW

SEQ ID NO: 100735 - protein, 106 aa, Homo sapiens
MGALSSQDSPHFQEKSTEEGEVAALRLTARSQETVTFKDVAMDFTPEEWGKLDPAQRDVMLENYRNLVSLWLPVSKPESYNLENGKEPLKLERKAPKSSYSELPFC

SEQ ID NO: 100736 - protein, 344 aa, Homo sapiens
MWSPQDRKYNSPPTQLSLKPNSQSLRSGNWSERKSHRLPRLPKRHSHDDMLLLAQLSLPSSPSSLNEDSLSTTSELLSSRRARRIPKLVQRINSIYNAKRGKKRLKKLSMSSIETASLRDENSESESDSDDRFKAHTQRLVHIQSMLKRAPSYRTLELELLEWQERELFEYFVVVSLKKKPSRNTYLPEVSYQFPKLDRPTKQMREAEERLKAIPQFCFPDAKDWLPVSEYSSETFSFMLTGEDGSRRFGYCRRLLPSGKGPRLPEVYCVISRLGCFGLFSKVLDEVERRRGISAALVYPFMRSLMESPFPAPGKTIKVKTFLPGAGNEVLELRRPMDSRLEHV

SEQ ID NO: 100737 - protein, 241 aa, Homo sapiens
MVDQLRERTTMADPLRERTELLLADYLGYCAREPGTPEPAPSTPEAAVLRSAAARLRQIHRSFFSAYLGYPGNRFELVALMADSVLSDSPGPTWGRVVTLVTFAGTLLERGPLVTARWKKWGFQPRLKEQEGDVARDCQRLVALLSSRLMGQHRAWLQAQGGWVSTRRTPGHGAGRAAGKRPRGWHGWLLSLLQDPLSTGFLEKTAGPGFSVMLVNNSLHLSLDTIIMSFKTFNPLLPAQL

SEQ ID NO: 100738 - protein, 20 aa, Homo sapiens
  MOD_RES (1)..(1): Any amino acid
XIQGAQKLVFGQGTRLTINP

SEQ ID NO: 100739 - protein, 72 aa, Homo sapiens
NDPLNQNKGKPDLNTTLPIRQTASIFKQPVTKVTNHPSNKVKSDPQRMNEQPRQVSQENRRYLEPHWISILL

SEQ ID NO: 100740 - protein, 130 aa, Homo sapiens
MWPLLTMHITQLNRECLLHLFSFLDKDSRKSLARTCSQLHDVFEDPALWSLLHFRSLTELQKDNFLLGPALRSLSICWHSSRVQVCSIEDWLKSAFQRSICSRHESLVNDFLLRVCDRVRGLNDTVAPGT

SEQ ID NO: 100741 - protein, 37 aa, Homo sapiens
  MOD_RES (1)..(1): Any amino acid
XILASCPQQSLSPENYYRDICPQFFCRFWIYFTFKIN

SEQ ID NO: 100742 - protein, 178 aa, Homo sapiens
  MOD_RES (1)..(1): Any amino acid
XRLRRPGPRGAVAMAAAAGDADDEPRSGHSSSEGECAVAPEPLTDAEGLFSFADFGSALGGGGAGLSGRASGGAQSPLRYLHVLWQQDAEPRDELRCKIPAGRLRRAARPHRRLGPTGKEVHALKRLRDSANANDVETVQQLLEDGADPCAADDKGRTALHFASCNGNDQIAAPGPWC

SEQ ID NO: 100743 - protein, 116 aa, Homo sapiens
  MOD_RES (1)..(1): Any amino acid
XLATPPRRAPDQAAEIGSRGSTKAQGPQQQPGSEGPSYAKKVALWLAGLLGAGGTVSVVYIFGNNPVDENGAKVRGKETEALPGVLVCGFLMSSTMIQFWYSSCAGHTNISKIIDR

SEQ ID NO: 100744 - protein, 161 aa, Homo sapiens
LPHRPLLVDLTVEEGQRLKVIYGSSAGFHAVDVDSGNSYDIYIPVHIQSQITPHAIIFLPNTDGMEMLLCYEDEGVYVNTYGRIIKDVVLQWGEMPTSVAYICSNQIMGWGEKAIEIRSVETGHLDGVFMHKRAQRLKFLCERNDKVGGSFPLKALLSRLP

SEQ ID NO: 100745 - protein, 194 aa, Homo sapiens
VNEEVAKLRRRLMELISLVQEVERNVEAVRNAKDERVREIRNAVEMMIARLDTQLKNKLITLMGQKTSLTQETELLESLLQEVEHQGASCFWKKWCQGRIYTLRSCSKSELISKSSEILMMFQQVHRKPMASFVTTPVPPDFTSELVPSYDSATFVLENFSTLRQRADPVYSPPLQVSGLCWRLKVYPDGNGVV

SEQ ID NO: 100746 - protein, 64 aa, Homo sapiens
  MOD_RES (1)..(1): Any amino acid
XGSSLLKEEEEDGQEGSIHNLPLVTSQRPFYDGPMPTPRQKPFQSGSTPLHLTHRFMQASLPAL

SEQ ID NO: 100747 - protein, 104 aa, Homo sapiens
MREIVHIQAGQCGNQIGTKFWEVISDEHGIDPAGGYVGDSALQLERINVYYNESSSQKYVPRAALVDLEPGTMDSVRSGPFGQLFRPDNFIFAHLHRGTEEKQE

SEQ ID NO: 100748 - protein, 499 aa, Homo sapiens
MKRPLSPPPPAEKETPISGAAECLPRPPEPPKPKRERKRPSYTLCDVCNIQLNSAAQAQVHCGGRAHQRRLRQLSLGKSPSGPAGPASGAPSPLLASLPLPTRPLQPPLDFKHLLAFHFNGAAPLSLFPNFSTMDPVQKAVISHTFGVPSPLKKKLFISCNICHLRFNSANQAEAHYKGHKHARKLKAVEAAKSKQRPHTQAQDGAVVSPIPTLASGAPGEPQSKAVPAAPPLGPPLQPPPTPDPTCREPAHSELLDAASSSSSSSCPPCSPEPGREAPGPEPAAAAVGSSMSGEGRSEKGHLYCPTCKVTVNSASQLQAHNTGAKHRWMMEGQRGAPRRSRGRPVSRGGAGHKAKRVTGGRGGRQGPSPAFHCALCQLQVNSETQLKQHMSSRRHKDRLAGKTPKPSSQHSKLQKHAALASKLALQKQLTKTLAARFLPSPLPTAATAICALPGPLALRPAPTAATTLFPAPILGPALFRTPAGAVRPATGPIVLAPY

SEQ ID NO: 100749 - protein, 216 aa, Homo sapiens
MSSVELDDELLDPDMDPPHPFPKEIPHNEKLLSLKYESLDYDNSENQLFLEEERRINHTAFRTVEIKRWVICALIGILTGLVACFIDIVVENLAGLKYRVIKGNIDKFTEKGGLSFSLLLWATLNAAFVLVGSVIVAFIEPVAAGSGIPQIKCFLNGVKIPHVVRLKTLVIKVSGVILSVVGGLAVGKEGPMIHSGSVIAAGISQGRSTSLKRDFK

SEQ ID NO: 100750 - protein, 961 aa, Homo sapiens
MPIVDKLKEALKPGRKDSADDGELGKLLASSAKKVLLQKIEFEPASKSFSYQLEALKSKYVLLNPKTEGASRHKSGDDPPARRQGSEHTYESCGDGVPAPQKVLFPTERLSLRWERVFRVGAGLHNLGNTCFLNATIQCLTYTPPLANYLLSKEHARSCHQGSFCMLCVMQNHIVQAFANSGNAIKPVSFIRDLKKIARHFRFGNQEDAHEFLRYTIDAMQKACLNGCAKLDRQTQATTLVHQIFGGYLRSRVKCSVCKSVSDTYDPYLDVALEIRQAANIVRALELFVKADVLSGENAYMCAKCKKKVPASKRFTIHRTSNVLTLSLKRFANFSGGKITKDVGYPEFLNIRPYMSQNNGDPVMYGLYAVLVHSGYSCHAGHYYCYVKASNGQWYQMNDSLVHSSNVKVVLNQQAYVLFYLRIPGSKKSPEGLISRTGSSSLPGRPSVIPDHSKKNIGNGIISSPLTGKRQDSGTMKKPHTTEEIGVPISRNGSTLGLKSQNGCIPPKLPSGSPSPKLSQTPTHMPTILDDPGKKVKKPAPPQHFSPRTAQGLPGTSNSNSSRSGSQRQGSWDSRDVVLSTSPKLLATATANGHGLKGNDESAGLDRRGSSSSSPEHSASSDSTKAPQTPRSGAAHLCDSQETNCSTAGHSKTPPSGADSKTVKLKSPVLSNTTTEPASTMSPPPAKKLALSAKKASTLWRATGNDLRPPPPSPSSDLTHPMKTSHPVVASTWPVHRARAVSPAPQSSSRLQPPFSPHPTLLSSTPKPPGTSEPRSCSSISTALPQVNEDLVSLPHQLPEASEPPQSPSEKRKKTFVGEPQRLGSETRLPQHIREATAAPHGKRKRKKKKRPEDTAASALQEGQTQRQPGSPMYRREGQAQLPAVRRQEDGTQPQVNGQQVGCVTDGHHASSRKRRRKGAEGLGEEGGLHQDPLRHSCSPMGDGDPEAMEESPRKKKKKKR

SEQ ID NO: 100751 - protein, 107 aa, Homo sapiens
MATEEFIIRIPPYHYIHVLDQNSNVSRVEVGPKTYIRQDNERVLFAPMRMVTVPPRHYCTVANPVSRDAQGLVLFDVTGQVRLRHADLEIRLAQDPFPLYPGEVLEK

SEQ ID NO: 100752 - protein, 80 aa, Homo sapiens
MVTSLNEDNESVTVEWIENGDTKGKEIDLESIFSLNPDLVPDEEIEPSPETPPPPASSAKVNKIVKNRRTVASIKNDPPS

SEQ ID NO: 100753 - protein, 157 aa, Homo sapiens
MVLRSLVEYSQDVLAHPVSEEHLPDVSLIGEFSDPAELGKLLQLVLGCAISCEKKQDHIQRIMTLEESVQHVVMEAIQELMTKDTPDSLSPETYGNFDSQSRRYYFLSEEAEEGDELQQRCLDLERQLMLLSEEKQSLAQENAGLRERMGRPEGEGT

SEQ ID NO: 100754 - protein, 164 aa, Homo sapiens
MPASAARPRPGPGQPTASPFPLLLLAVLSGPVSGRVPRSVPRTSLPISEADSCLTRFAVPHTYNYSVLLVDPASHTLYVGARDTIFALSLPFSGERPRRIDWMVPEAHRQNCRKKGKKEDVSRFQQVERLESGRGKCPFEPAQRSAAVMAGGVLYAATVKNYLG

SEQ ID NO: 100755 - protein, 428 aa, Homo sapiens
LYRYPFERLKMSADDGIRNLYLDFGGPEGELKAIDLVTKATEEDKAKNYEEALRLYQHAVEYFLHAIKYEAHSDKAKESIRAKCVQYLDRAEKLKDYLRSKEKHGKKPVKENQSEGKGSDSDSEGDNPEKKKLQEQLMGAVVMEKPNIRWNDVAGLEGAKEALKEAVILPIKFPHLFTGKRTPWRGILLFGPPGTGKSYLAKAVATEANNSTFFSVSSSDLMSKWLGESEKLVKNLFELARQHKPSIIFIDEVDSLCGSRNENESEAARRIKTEFLVQMQGVGNNNDGTLVLGATNIPWVLDSAIRRRFEKRIYIPLPEEAARAQMFRLHLGSTPHNLTDANIHELARKTEGYSGADISIIVRDSLMQPVRKVQSATHFKKVCGPSRTNPSMMIDDLLTPCSPGDPGAMEMTWMDVPGDKLLEPVVCM

SEQ ID NO: 100756 - protein, 111 aa, Homo sapiens
SCGDSSPDTFSDGLSSSTLPDDHSSYTVPGYMQDLEVEQALTPGELVQVWQETPQHCRHVLSAALSPTGTSQWKLCRTAPVICTTSRCHPCPPPLKLQQMRMRKGNYLRTS

SEQ ID NO: 100757 - protein, 248 aa, Homo sapiens
MSHQFSSQSAFSSMSRRVYSTSSSAGSGGGSPAVGSVCYARGRCGGGGYGIHGRGFGSRSLYNLGGSRSISINLMGRSTSGFCQGGGVGGFGGGRGFGVGSTGAGGFGGGGFGGAGFGTSNFGLGGFGPYCPPGGIQEVTINQSLLEPLHLEVDPEIQRIKTQEREQIMVLNNKFASFIDKRKEPWGHQCLRCSETPFPYVGMDKLSVEGAIPGAAEPGATNKMGVAAAGEHLNWNQQPGAPLGELHR

SEQ ID NO: 100758 - protein, 127 aa, Homo sapiens
MSQEGVELEKSVRRLREKFHGKVSSKKAGALMRKFGSDHTGVGRSIVYGVKQKDGQELSNDLDAQTKKLRPKSLASKQGQLRFEPWPPGVRAWALTCLRAQRGLKGAICHNINKHVAFAGRKIHQKI

SEQ ID NO: 100759 - protein, 85 aa, Homo sapiens
MGKCRGLRTARKLRSHRRDQKWHDKQYKKAHLGTALKANPFGGASHAKGIVLEKVGVEAKQPNSAIRKCVRVQLIKNGKKERPRS

SEQ ID NO: 100760 - protein, 75 aa, Homo sapiens
MEGAGYRVVFEKGGVYLHTSAKKYQDRDSLIAGVIRVVEKDNDVLLHWAPVEEAGDSTQILFSKKGPEVSRHPQS

SEQ ID NO: 100761 - protein, 379 aa, Homo sapiens
MASPVAAQAGKLLRALALRPRFLAAGSQAVQLTSRRWLNLQEYQSKKLMSDNGVRVQRFFVADTANEALEAAKRLNAKEIVLKAQILAGGRGKGVFNSGLKGGVHLTKDPNVVGQLAKQMIGYNLATKQTPKEGVKVNKVMVAEALDISRETYLAILMDRSCNGPVLVGSPQGGVDIEEVAASNPELIFKEQIDIFEGIKDSQAQRMAENLGFVGPLKSQAADQITKLYNLFLKIDATQVEVNPFGETPEGQVVCFDAKINFDDNAEFRQKDIFAMDDKSENEPIENEAAKYDLKYIGLDGNIACFVNGAGLAMATCDIIFLNGGKPANFLDLGGGVKEAQVYQAFKLLTADPKQQNLKARNTWAPEYRTQKHVLEAWK

SEQ ID NO: 100762 - protein, 35 aa, Homo sapiens
RVYFLIYGGSTEEQRYLTALRKEKEAFEKLIRSTV

SEQ ID NO: 100763 - protein, 72 aa, Homo sapiens
  MOD_RES (1)..(1): Any amino acid
XRDPEFVFYDQLKQVMNAYRVKPAVFDLLLAVGIAAYLGMAYVAVQVSSAQAQHFSLLYKTVQRLLVKAKTQ

SEQ ID NO: 100764 - protein, 119 aa, Homo sapiens
MISLIIPPKDQISRVAKMLADEFGTASNIKSRVNRLSVLGAITSVQQRLKLYNKVPPNGLVVYCGTIVTEEGKEKKVNIDFEPFKPINTSLYLCDNKFHTEALTALLSDDSKFGFIVID

SEQ ID NO: 100765 - protein, 43 aa, Homo sapiens
MRCLTTPMLLRALAQAARAGPPGGRSLHSSAVAATYSEYLGGL

SEQ ID NO: 100766 - protein, 112 aa, Homo sapiens
MGSLTFRDVAIEFSLEEWQCLDTAQQNLYRNVMLENYRNLVFLGIAAFKPDLIIFLEEGKESWNMKRHEMVEESPGMVGSSGPESSAPYHVHCCPFVLSLRLVSETHQLFLS

SEQ ID NO: 100767 - protein, 46 aa, Homo sapiens
MVKAGTCCATCKEFYQMKQTVLQLKQKIALLPNNAADLGKYITGDK

SEQ ID NO: 100768 - protein, 227 aa, Homo sapiens
GDHRVELYKVLSSLGYHVVTFDYRGWGDSVGTPSERGMTYDALHVFDWIKARSGDNPVYIWGHSLGTGVATNLVRRLCERETPPDALILESPFTNIREEAKSHPFSVIYRYFPGFDWFFLDPITSSGIKFANDENVKHISCPLLILHAEDDPVVPFQLGRKLYSIAAPARSFRDFKVQFVPFHSDLGYRHKYIYKSPELPRILSCLWKFQRQNCVPLAQGIPGEVGA

SEQ ID NO: 100769 - protein, 60 aa, Homo sapiens
MSFLTEGRLHLTLHLSLILNTLAGAIQTACVFVCWFLRDNQRDTDRLFYQRTTAAGGFLH

SEQ ID NO: 100770 - protein, 168 aa, Homo sapiens
MSMEDYDFLFKIVLIGNAGVGKTCLVRRFTQGLFPPGQGATIGVDFMIKTVEINGEKVKLQIWDTAGQERFRSITQSYYRSANALILTYDITCEESFRCLPEWLREIEQYASNKVITVLVGNKIDLAERREVSQQRAEEFSEAQDMYYLETSAKESDNVEKLFLDLAC

SEQ ID NO: 100771 - protein, 119 aa, Homo sapiens
SDPDVILCNSVELIRERLTVSEDGPGVRRQEEQKHDDYVYDIYYLETATPGWIENILSVQPYSQEWELVNDDQEPEDIYDDEDDENSENNWRNEYPEEESSDGDEDSRGGWQPQTGRDW

SEQ ID NO: 100772 - protein, 45 aa, Homo sapiens
MVMAEGTAVLRRNRPGTKAQDFYNWPDESFDEMDSTLAVQQAVLP

SEQ ID NO: 100773 - protein, 395 aa, Homo sapiens
MGVRMTEYVGLYRHGDRSPVKTYPKDPYQEEEWPQGFGQLTKEGMLQHWELGQALRQRYHGFLNTSYHRQEVYVRSTDFDRTLMSAEANLAGLFPPNGMQRFNPNISWQPIPVHTVPITEDRLLKFPLGPCPRYEQLQNETRQTPEYQNESSRNAQFLDMVANETGLTDLTLETVWNVYDTLFCEQTHGLRLPPWASPQTMQRLSRLKDFSFRFLFGIYQQAEKARLQGGVLLAQIRKNLTLMATTSQLPKLLVYSAHDTTLVALQMALDVYNGEQAPYASCHIFELYQEDSGNFSVEMYFRNESDKAPWPLSLPGCPHRCPLQDFLRLTEPVVPKDWQQECQLASGPADTEVIVALAVCGSILFLLIVLLLTVLFRMQAQPPGYRHVADGEDHA

SEQ ID NO: 100774 - protein, 43 aa, Homo sapiens
MSGTSSPEAVKKLLENMQSDLRALSLECKKKFPPVKEVQMRGI

SEQ ID NO: 100775 - protein, 61 aa, Homo sapiens
MNPQIRWILRPIVMQKGASSLGSATTYCLLTQSTRSPGTHLGALAQTVQGRWPSSWPGTAT

SEQ ID NO: 100776 - protein, 142 aa, Homo sapiens
GFCFDSSFDVHKKCPLCELMFPPNYDQSKFEEHVESHWKVCPMCSEQFPPDYDQQVFERNWAGKRLLFPSIHAHGAEDGFGADGTLCGPGLIAVRLLIVHLLLVILAACRTREVQGLSGALISPQVHPATSRTGDVAVAEQR

SEQ ID NO: 100777 - protein, 455 aa, Homo sapiens
MGEVEAPGRLWLESPPGGAPPIFLPSDGQALVLGRGPLTQVTDRKCSRTQVELVADPETRTVAVKQLGVNPSTTGTQELKPGLEGSLGVGDTLYLVNGLHPLTLRWEETRTPESQPDTPPGTPLVSQDEKRDAELPKKRMRKSNPGWENLEKLLVFTAAGVKPQGKVAGFDLDGTLITTRSGKVFPTGPSDWRILYPEIPRKLRELEAEGYKLVIFTNQMSIGRGKLPAEEFKAKVEAVVEKLGVPFQVLVATHAGLYRKPVTGMWDHLQEQANDGTPISIGDSIFVGDAAGRPANWAPGRKKKDFSCADRLFALNLGLPFATPEEFFLKWPAAGFELPAFDPRTVSRSGPLCLPESRALLSASPEVVVAVGFPGAGKSTFLKKHLVSAGYVHVNRVRPVCPSRGRPLPLLPLHRHSGAGAPQQPVSRDDGLLSYPRVRHGHVWLQEAVRGPNAG

SEQ ID NO: 100778 - protein, 47 aa, Homo sapiens
KMLKPHRTPPAPVTEEMLQRVLPQKLRAHPRLKCGAQSWSGTQATKA

SEQ ID NO: 100779 - protein, 111 aa, Homo sapiens
MLVHGTFWKHWPSILLKGLSCQGRTHIHLAPGLPGDPGIISGMRSHCEIAVFIDGPLALAGNTDGFLLPKYFKEALQLRPTRKPLSLAGDEETECQSSPKHSSRERRRIQQ

SEQ ID NO: 100780 - protein, 333 aa, Homo sapiens
MFYGIFLYLGEVTKAVQPLLLGRIIASYDPDNKEERSIAIYLGIGLCLLFIVRTLLLHPAIFGLHHIGMQMRIAMFSLIYKKTLKLSSRVLDKISIGQLVSLLSNNLNKFDEGLALAHFVWIAPLQVALLMGLIWELLQASAFCGLGFLIVLALFQAGLGRMMMKYRDQRAGKISERLVITSEMIENIQSVKAYCWEEAMEKMIENLRQTELKLTRKAAYVRYFNSSAFFFSGFFVVFLSVLPYALIKGIILRKIFTTISFCIVLRMAVTRQFPWAVQTWYDSLGAINKIQDFLQKQEYKTLEYNLTTTEVVMENVTAFWEEGFGELFEKAKQ

SEQ ID NO: 100781 - protein, 45 aa, Homo sapiens
MGNKQTVFTHEQLEAYQDCTFFTRKEIMRTWPHSSCPSTIPPAPM

SEQ ID NO: 100782 - protein, 49 aa, Homo sapiens
MAAPCEGQAFAVGVEKNWGAVVRSPEGTPQKIRQLIDEGIAPEEGGVDA

SEQ ID NO: 100783 - protein, 169 aa, Homo sapiens
MELIQDTSRPPLEYVKGVPLIKYFAEALGPLQSFQARPDDLLISTYPKSGMETLKDTPAPRLLKTHLPLALLPQTLLDQKVKVVYVARNAKDVAVSYYHFYHMAKVHPEPGTWDSFLEKFMVGEVSYGSWYQHVQEWWELSRTHPVLYLFYEDMKENPKREIQKILEFV

SEQ ID NO: 100784 - protein, 544 aa, Homo sapiens
MSVLDALWEDRDVRFDLSAQQMKTRPGEVLIDCLDSIEDTKGNNGDRGRLLVTNLRILWHSLALSRVNVSVGYNCILNITTRTANSKLRGQTEALYILTKCNSTRFEFIFTNLVPGSPRLFTSVMAVHRAYETSKMYRDFKLRSALIQNKQLRLLPQEHVYDKINGVWNLSSDQGNLGTFFITNVRIVWHANMNDSFNVSIPYLQIRSIKIRDSKFGLALVIESSQQSGGYVLGFKIDPVEKLQESVKEINSLHKVYSASPIFGVDYEMEEKPQPLEALTVEQIQDDVEIDSDGHTDAFVAYFADGNKLDSIASEWVGLPPLPSARCLFGLGEVDDKIYVVAGKDLQTEASLDSVLCYDPVAAKWNEVKKLPIKVYGHNVISHKGMIYCLGGKTDDKKCTNRVFIFNPKKGDWKDLAPMKIPRSMFGVAVHKGKIVIAGGVTEDGLSASVEAFDLTTNKWDVMTEFPQERSSISLVSLAGSLYAIGGFAMIQLESKEFAPTEVNDIWKYEDDKKEWAGMLKEIRYASGASCLATRLNLFKLSKL

SEQ ID NO: 100785 - protein, 197 aa, Homo sapiens
MATEAQSEGEVPARESGRSDAICSFVICNDSSLREKGVIFGSPLTEEGIAQIYQLIEYLHKNLRVEGLFRVPGNSVRQQILRDALNNGTDIDLESGEFHSNDVATLLKMFLGELPEPLLTHKHFNAHLKIADLMQFDDKGNKTNIPDKDRQIEALQLLFLILPPPNRNLLKLLLDLLYQTAKKQDKNKMSAYNLALM

SEQ ID NO: 100786 - protein, 40 aa, Homo sapiens
MCAASASPDQKSNVDFKVIQRTNTNKTTQASVVAGIPEAE

SEQ ID NO: 100787 - protein, 186 aa, Homo sapiens
VNYAAGLSPYADKGKCGLPEIFDPPEELERKVWELARLVWQSSSVVFHTGAGISTASGIPDFRDKLAELHGNMFVEECAKCKTQYVRDTVVGTMGLKATGRLCTVAKARGLRACRGELRDTILDWEDSLPDRDLALADEASRNADLSITLGTSLQIRPSGNLPLATKRRGGRLVIVNLQPTKHVGV

SEQ ID NO: 100788 - protein, 118 aa, Homo sapiens
LAKGRIQARRMKMQRIAALLDLPIQPTTEVLGFGLGSSTSTQHLPFRFYDQGRRGSSDPTVQRSVFASVDKVPALLTAAVERQPRWPLPSLLVPWLTDCCGGLCLLIYRRFSRIVFKI

SEQ ID NO: 100789 - protein, 102 aa, Homo sapiens
MGDAPDYDRSQWLNEKFKLGLDFPNLPYLIDGAHKITQSNAILCYIARKHNLCGETEEEKIRVDILENQTMDNHMQLGMICYNPEFEKLKPKYLEELPEKLK

SEQ ID NO: 100790 - protein, 74 aa, Homo sapiens
MPRARKGNTLRKGGQRRGGGARSSAQADSGSSDDEAASEARSTASECPSLLSTTAEDSLVPRPGRVLLRACAWP

SEQ ID NO: 100791 - protein, 57 aa, Homo sapiens
MERKNPSRESPRRLSAKVGKGTEMKKVARQLGMAAAESDKDSGFSGILPGCLPHQTT

SEQ ID NO: 100792 - protein, 305 aa, Homo sapiens
MASNVTNKTDPRSMNSRVFIGNLNTLVVKKSDVEAIFSKYGKIVGCSVHKGFAFVQYVNERNARAAVAGEDGRMIAGQVLDINLAAEPKVNRGKAGVKRSAAEMYGSVTEHPSPSPLLSSSFDLDYDFQRDYYDRMYSYPARVPPPPPIARAVVPSKRQRVSGNTSRRGKSGFNSKSGQRGSSKSGKLKGDDLQAIKKELTQIKQKVDSLLENLEKIEKEQSKQAEMKNDKSEEEQSSSSVKKDETNVKMESEGGADDSAEEGDLLDDDDNEDRGDDQLELIKDDEKEAEEGEDDRDSANGEDDS

SEQ ID NO: 100793 - protein, 150 aa, Homo sapiens
  MOD_RES (1)..(1): Any amino acid
XEELEDHEDEFNEEDERAIEMYRRRRLAEWKATKLKNKFGEVLEISGKDYVQEVTKAGEGLWVILHLYKQGIPLCALINQHLSGLARKFPDVKFIKAISTTCIPNYPDRNLPTIFVYLEGDIKAQFIGPLVFGGMNLTRDGKGSGRQAGQ

SEQ ID NO: 100794 - protein, 69 aa, Homo sapiens
MAEKVNNFPPLPKFIPLKPCFYQDFEADIPPQHVSMTKRLYYLWMLNSVTLAVNLVGCLAWLIGGGGAT

SEQ ID NO: 100795 - protein, 136 aa, Homo sapiens
  MOD_RES (1)..(1): Any amino acid
XVASQGPCKEPLQIPYSCPLPSSKDSSCSTNPSCSSTIISKCQSSDSESRSSHQSQSRSQSKSPHDGRSQSWSKRHHLSRSPSQKSSPYPSRSWGRSSNPQQNTSQGQSESPQLSINEHQGESPQISRGQGKSKSL

SEQ ID NO: 100796 - protein, 72 aa, Homo sapiens
MTAQGGLVANRGRRFKWAIELSGPGGGSRGRSDRGSGQGDSLYPVGYLDKQVPDTSVQETDRILVEKVQRLQ

SEQ ID NO: 100797 - protein, 133 aa, Homo sapiens
MAALTPRKRKQDSLKCDSLLHFTENLFPSPNKKHCFYQNSDKNEENLHCSQQEHFVLSALKTTEINRLPSANQGSPFKSALSTVSFYNQNKWYLNPLERKLIKESRSTCLKTNDEDKSFPIVTEKMQGKPVCS

SEQ ID NO: 100798 - protein, 166 aa, Homo sapiens
  MOD_RES (1)..(1): Any amino acid
XSHSSEAGKKDVSGPLRELRPRLCHLRKGPQGYGFNLHSDKSRPGQYIRSVDPGSPAARSGLRAQDRLIEVNGQNVEGLRHAEVVASIKAREDEARLLVVDPETDEHFKRLRVTPTEEHVEGPLPSPVTNGTSPAQLNGGSACSSRSDLPGSDKDTEEGPPSGVWD

SEQ ID NO: 100799 - protein, 475 aa, Homo sapiens [sequence omitted]

SEQ ID NO: 100800 - protein, 73 aa, Homo sapiens
MVLGPEQKMSDDSVSGDHGESASLGNINPAYSNPSLSQSPGDSEEYFATYFNEKISIPEEENKRLMEPAVLLF

SEQ ID NO: 100801 - protein, 111 aa, Homo sapiens
MARAAPLLAALTALLAAAAAGGDAPPGKIAVVGAGIGGSAVAHFLQQHFGPRVQIDVYEKGTVGGRLATISVNKQHYESGAASFHSLSLHMQDFVKLLDGATETREGKELA

SEQ ID NO: 100802 - protein, 291 aa, Homo sapiens
  MOD_RES (1)..(1): Any amino acid
XNVDGVAATPTAASASCQYRCIECNQEAKELYRDYNHGVLKITICKSCQKPVDKYIEYDPVIILINAILCKAQAYRHILFNTQINIHGKLCIFCLLCEAYLRWWQLQDSNQNTAPDDLIRYAKEWDFYRMFAIAALGWSAVAQSQLTAALNSWAQAILLPRPPQVAGTTEQTAYFIGIFTFLWVERPMTAKKKPNFILLLKALLLSSYGKLLLIPAVIWEHDYTSVCLKLIKVFVLTSNFQAIRVTLNINRKLSFLAVLSGLLLESIMVYFFQSMEWDVGSDYAIFKSQDF

SEQ ID NO: 100803 - protein, 372 aa, Homo sapiens
MNEELRNLSLSGHVGFDSLPDQLVNKSTSQGFCFNILCVGETGIGKSTLMDTLFNTKFESDPATHNEPGVRLKARSYELQESNVRLKLTIVDTVGFGDQINKDDSYKPIVEYIDAQFEAYLQEELKIKRSLFNYHDTRIHACLYFIAPTGHSLKSLDLVTMKKLDSKVNIIPIIAKADTIAKNELHKFKSKIMSELVSNGVQIYQFPTDEETVAEINATMSVHLPFAVVGSTEEVKIGNKMAKARQYPWGVVQVENENHCDFVKLREMLIRVNMEDLREQTHTRHYELYRRCKLEEMGFKDTDPDSKPFSLQETYEAKRNEFLGELQKKEEEMRQMFVMRVKEKEAELKEAEKELHEKFDLLKRTHQEEKKK

SEQ ID NO: 100804 - protein, 145 aa, Homo sapiens
MVYMFLGVSIIADRFMAAIEVITSKEKEITITKANGETSVGTVRIWNETVSNLTLMALGSSAPEILLSVIEVCGHNFQAGELGPGTIVGSAAFNMFVVIAVCIYVIPAGESRKIKHLRVFFVTASWSIFAYVWLYLILAVFSPGV

SEQ ID NO: 100805 - protein, 108 aa, Homo sapiens
  MOD_RES (1)..(1): Any amino acid
XLQALRKEKSRDAARSRRGKENFEFYELAKLLPLPAAITSQLDKASIIRLTISYLKMRDFANQGDPPWNLRMEGPPPNTSVKGAQRRRSPSALAIEVFEAHLGSHILQ

SEQ ID NO: 100806 - protein, 1542 aa, Homo sapiens
MRGVGWQMLSLSLGLVLAILNKVAPQACPAQCSCSGSTVDCHGLALRSVPRNIPRNTERLDLNGNNITRITKTDFAGLRHLRVLQLMENKISTIERGAFQDLKELERLRLNRNHLQLFPELLFLGTAKLYRLDLSENQIQAIPRKAFRGAVDIKNLQLDYNQISCIEDGAFRALRDLEVLTLNNNNITRLSVASFNHMPKLRTFRLHSNNLYCDCHLAWLSDWLRQRPRVGLYTQCMGPSHLRGHNVAEVQKREFVCSDEEEGHQSFMAPSCSVLHCPAACTCSNNIVDCRGKGLTEIPTNLPETITEIRLEQNTIKVIPPGAFSPYKKLRRIDLSNNQISELAPDAFQGLRSLNSLVLYGNKITELPKSLFEGLFSLQLLLLNANKINCLRVDAFQDLHNLNLLSLYDNKLQTIAKGTFSPLRAIQTMHLAQNPFICDCHLKWLADYLHTNPIETSGARCTSPRRLANKRIGQIKSKKFRCSAKEQYFIPGTEDYRSKLSGDCFADLACPEKCRCEGTTVDCSNQKLNKIPEHIPQYTAELRLNNNEFTVLEATGIFKKLPQLRKINFSNNKITDIEEGAFEGASGVNEILLTSNRLENVQHKMFKGLESLKTLMLRSNRITCVGNDSFIGLSSVRLLSLYDNQITTVAPGAFDTLHSLSTLNLLANPFNCNCYLAWLGEWLRKKRIVTGNPRCQKPYFLKEIPIQDVAIQDFTCDDGNDDNSCSPLSRCPTECTCLDTVVRCSNKGLKVLPKGIPRDVTELYLDGNQFTLVPKELSNYKHLTLIDLSNNRISTLSNQSFSNMTQLLTLILSYNRLRCIPPRTFDGLKSLRLLSLHGNDISVVPEGAFNDLSALSHLAIGANPLYCDCNMQWLSDWVKSEYKEPGIARCAGPGEMADKLLLTTPSKKFTCQGPVDVNILAKCNPCLSNPCKNDGTCNSDPVDFYRCTCPYGFKGQDCDVPIHACISNPCKHGGTCHLKEGEEDGFWCICADGFEGENCEVNVDDCEDNDCENNSTCVDGINNYTCLCPPEYTAANLNEVEKGELCEEKLDFCAQDLNPCQHDSKCILTPKGFKCDCTPGYVGEHCDIDFDDCQDNKCKNGAHCTDAVNGYTCICPEGYSGLFCEFSPPMVLPRTSPCDNFDCQNGAQCIVRINEPICQCLPGYQGEKCEKLVSVNFINKESYLQIPSAKVRPQTNITLQIATDEDSGILLYKGDKDHIAVELYRGRVRASYDTGSHPASAIYSVETINDGNFHIVELLALDQSLSLSVDGGNPKIITNLSKQSTLNFDSPLYVGGMPGKSNVASLRQAPGQNGTSFHGCIRNLYINSELQDFQKVPMQTGILPGCEPCHKKVCAHGTCQPSSQAGFTCECQEGWMGPLCDQRTNDPCLGNKCVHGTCLPINAFSYSCKCLEGHGGVLCDEEEDLFNPCQAIKCKHGKCRLSGLGQPYCECSSGYTGDSCDREISCRGERIRDYYQKQQGYAACQTTKKVSRLECRGGCAGGQCCGPLRSKRRKYSFECTDGSSFVDEVEKVVKCGCTRCVS

SEQ ID NO: 100807 - protein, 112 aa, Homo sapiens
  MOD_RES (1)..(1): Any amino acid
XAGPTNAIFKAFAMIIDKLEEDISSSMTNSTAASRPPVTLRLVVPASQCGSLIGKGGCKIKEIREAGVQWRSHGSLQQNIDLPSLRRSSHLSLPRSRDCRLPPPHPNFCIFL

SEQ ID NO: 100808 - protein, 178 aa, Homo sapiens
MAGVGAGPLRAMGRQALLLLALCATGAQGLYFHIGETEKRCFIEEIPDETMVIGNYRTQMWDKQKEVFLPSTPGLGMHVEVKDPDGKVVLSRQYGSEGRFTFTSHTPGDHQICLHSNSTRMALFAGGKLYREERFRLTSESTNQRVLWWSIAQTVILILTGIWQMRHLKSFFEAKKLV

SEQ ID NO: 100809 - protein, 270 aa, Homo sapiens
MAERAALEELVKLQGERVRGLKQQKASAELIEEEVAKLLKLKAQLGPDESKQKFVLKTPKGTRDYSPRQMAVREKVFDVIIRCFKRHGAEVIDTPVFELKETLMGKYGEDSKLIYDLKDQGGELLSLRYDLTVPFARYLAMNKLTNIKRYHIAKVYRRDNPAMTRGRYREFYQCDFDIAGNFDPMIPDAECLKIMCEILSSLQIGDFLVKVNDRRILDGMFAICGVSDSKFRTICSSVDKLDKVGYPWWNSCSRILNYPKTSRPWRAWET

SEQ ID NO: 100810 - protein, 131 aa, Homo sapiens
DDRFIVKLAYESDGIVVSNDTYRDLQGERQEWKRFIEERLLMYSFVNDKLAIGPFSAIRSPCMAPTSREFFAPSAGLCPLMTHWAGTGPAWTTSCVRSHSLWSTGSSRVPMVWNPACPPRPSSLLPFLSPV

SEQ ID NO: 100811 - protein, 85 aa, Homo sapiens
AKCLEALGINSVRDLQTFSPKILEKELGISVAQRIQKLSFGEDNSPVILSGPPQSFSEEDSFKKCSSEVEAKNKIEELLASLLNR

SEQ ID NO: 100812 - protein, 417 aa, Homo sapiens
MEEPEEPADSGQSLVPVYIYSPEYVSMCDSLAKIPKRASMVHSLIEAYALHKQMRIVKPKVASMEEMATFHTDAYLQHLQKVSQEGDDDHPDSIEYGLGYDCPATEGIFDYAAAIGGATITAAQCLIDGMCKVAINWSGGWHHAKKDEASGFCYLNDAVLGILRLRRKFERILYVDLDLHHGDGVEDAFSFTSKVMTVSLHKFSPGFFPGTGDVSDVGLGKGRYYSVNVPIQDGIQDEKYYQICESVLKEVYQAFNPKAVVLQLGADTIAGDPMCSFNMTPVGIGKCLKYILQWQLATLILGGGGYNLANTARCWTYLTGVILGKTLSSEIPDHEFFTAYGPDYVLEITPSCRPDRNEPHRIQQILNYIKGEHRPSRPALLVPPSLWWPISGGFLKYHLPFGKLIISLTWKGNLFLA

SEQ ID NO: 100813 - protein, 305 aa, Homo sapiens
MGARGALLLALLLARAGLGKPESQEEELLSEACGHREIHALVAGGVESARGRWPWQASLRLRRRHRCGGSLLSRRWVLSAAHCFQKHYYPSEWTVQLGELTSRPTPWNLRAYSSRYKVQDIIVNPDALGVLRNDIALLRLASSVTYNAYIQPICIESSTFNFVHRPDCWVTGWGLISPSGTPLPPPYNLREAQVTILNNTRCNYLFEQPSSRSMIWDSMFCAGAEDGSVDTCKGDSGGPLVCDKDGLWYQVGIVSWGMDCGQPNRPGVYTNISVYFHWIRRVMSHSTPRPNPSQLLLLLALLWAP

SEQ ID NO: 100814 - protein, 1409 aa, Homo sapiens
MESDRLIISLPRVKWTEAALTMASQLQEKCIAFIVDNFSKIIQSENFALLLQSQAMSSTADLLDTILKAIEENITTENSCSLLMALDTLLNSDSTKEMGFTCKIQALRDKLWIFLVQSFYAVRHTESWKLMSTDDQQKIQAAAFDKGDDRRLGKKPIFSSSQQRKQVSDSGDIKIKSWRGNNKKECWSYLSTNKKMKSDGLGASGHSSSTNRNSINKTLKQDDVKEKDGTKIASKITKELKTGGKNVSGKPKTVTKSKTENGDKARLENMSPRQVVERSATAAAAATGQKNLLNGKGVRNQEGQISGARPKVLTGNLNVQAKAKPLKKATGKDSPCLSIAGPSSRSTDSSMEFSISTECLDEPKENGSTEEEKPSGHKLSFCDSPGQMMKNSVDSVKNSTVAIKSRPVSRVTNGTSNKKSIHEQDTNVNNSVLKKVSGKGCSEPVPQAILKKRGTSNGCTAAQQRTKSTPSNLTKTQGSQGESPNSVKSSVSSRQSDENVAKLDHNTTTEKQAPKRKMVKQVHTALPKVNAKIVAMPKNLNQSKKGETLNNKDSKQKMPPGQVISKTQPSSQRPLKHETSTVQKSMFHDVRDNNNKDSVSEQKPHKPLINLASEISDAEALQSSCRPDPQKPLNDQEKEKLALECQNISKLDKSLKHELESKQICLDKSETKFPNHKETDDCDAANICCHSVGSDNVNSKFYSTTALKYMVSNPNENSLNSNPVCDLDSTSAGQIHLISDRENQVGRKDTNKQSSIKCVEDVSLCNPERTNGTLNSAQEDKKSKVPVEGLTIPSKLSDESAMDEDKHATADSDVSSKCFSGQLSEKNSPKNMETSESPESHETPETPFVGHWNLSTGVLHQRESPESDTGSATTSSDDIKPRSEDYDAGGSQDDDGSNDRGISKCGTMLCHDFLGRSSSDTSTPEELKIYDSNLRIEVKMKKQSNNDLFQVNSTSDDEIPRKRPEIWSRSAIVHSRERENIPRGSVQFAQEIDQVSSSADETEDERSEAENVAENFSISNPAPQQFQGIINLAFEDATENECREFSATKKFKRSVLLSVDECEELGSDEGEVHTPFQASVDSFSPSDVFDGISHEHHGRTCYSRFSRESEDNILECKQNKGNSVCKNESTVLDLSSIDSSRKNKQSVSATEKKNTIDVLSSRSRQLLREDKKVNNGSNVENDIQQRSKFLDSDVKSQERPCHLDLHQREPNSDIPKNSSTKSLDSFRSQVLPQEGPVKESHSTTTEKANIALSAGDIDDCDTLAQTRMYDHRPSKTLSPIYEMDVIEAFEQKVESETHVTDMDFEDDQHFAKQDWTLLKQLLSEQDSNLDVTNSVPEDLSLAQYLINQTLLLARDSSKPQGITHIDTLNRWSELTSPLDSSASITMASFSSEDCSPQGEWTILELETQH

SEQ ID NO: 100815 - protein, 21 aa, Homo sapiens
MSSCPSVGEKQNQENLKSGES

SEQ ID NO: 100816 - protein, 114 aa, Homo sapiens
RSRAALQRYLFYCNRYMNHMQSLRFEHKLYAQVKQKMEEMQQHNMSWIENNQADLENATEVLSGYLERDISQDSLQDIKQKVQDKYRYCESRRRVLLQHVHEGYEKDLWEYIED

SEQ ID NO: 100817 - protein, 149 aa, Homo sapiens
MNILAPVRRDRVLAELPQCLRKEAALHGHKDFHPRVTCACQEHRTGTVGFKISKVIVVGDLSVGKTCLINRFCKDTFDKNYKATIGVDFEMERFEVLGIPFSLQLWDTAGQERFKCIASTYYRGAQAIIIVFNLNDVASLEHTKQWLAD

SEQ ID NO: 100818 - protein, 808 aa, Homo sapiens
MSEFRIHHDVNELLSLLRVHGGDGAEVYIDLLQKNRTPYVTTTVSAHSAKVKIAEFSRTPEDFLKKYDELKSKNTRNLDPLVYLLSKLTEDKETLQYLQQNAKERAELAAAAVGSSTTSINVPAAASKISMQELEELRKQLGSVATGSTLQQSLELKRKMLRDKQNKKNSGQHLPIFPAWVYERPALIGDFLIGAGISTDTALPIGTLPLASQESAVVEDLLYVLVGVDGRYVSAQPLAGRQSRTFLVDPNLDLSIRELVHRILPVAASYSAVTRFIEEKSSFEYGQVNHALAAAMRTLVKEHLILVSQLEQLHRQGLLSLQKLWFYIQPAMRTMDILASLATSVDKGECLGGSTLSLLHDRSFSYTGDSQAQELCLYLTKAASAPYFEVLEKWIYRGIIHDPYSEFMVEEHELRKERIQEDYNDKYWDQRYTIVQQQIPSFLQKMADKILSTGKYLNVVRECGHDVTCPVAKEIIYTLKERAYVEQIEKAFNYASKVLLDFLMEEKELVAHLRSIKRYFLMDQGDFFVHFMDLAEEELRKPVEDITPPRLEALLELALRMSTANTDPFKDDLKIDLMPHDLITQLLRVLAIETKQEKAMAHADPTELALSGLEAFSFDYIVKWPLSLIINRKALTRYQMLFRHMFYCKHVERQLCSVWISNKTAKQHSLHSAQWFAGAFTLRQRMLNFVQNIQYYMMFEVMEPTWHILEKNLKSASNIDDVLGHHTGFLDTCLKDCMLTNPELLKVFSKLMSVCVMFTNCMQKFTQSMKLDGELGGQTLEHSTVLGLPAGAEERARKELARKIEEKT

SEQ ID NO: 100819 - protein, 785 aa, Homo sapiens
MGDMKTPDFDDLLAAFDIPDIDANEAIHSGPEENEGPGGPGKPEPGVGSESEDTAAASAGDGPGVPAQASDHGLPPPDISVVSVIVKNTVCPEQSEALAGGSAGDGAQAAGVTKEGPVGPHRMQNGFGSPEPSLPGTPHSPAPPSGGTWKEKGMEGKTPLDLFAHFGPEPGDHSDPLPPSAPSPTREGALTPPPFPSSFELAQENGPGMQPPVSSPPLGALKQESCSPHHPQVLAQQGSGSSPKATDIPASASPPPVAGVPFFKQSPGHQSPLASPKVPVCQPLKEEDDDEGPVDKSSPGSPQSPSSGAEAADEDSNDSPASSSSRPLKVRIKTIKTSCGNITRTVTQVPSDPDPPAPLAEGAFLAEASLLKLSPATPTSEGPKVVSVQLGDGTRLKGTVLPVATIQNASTAMLMAASVARKAVVLPGGTATSPKMIAKNVLGLVPQALPKADGRAGLGTGGQKVNGASVVMVQPSKTATGPSTGGGTVISRTQSSLVEAFNKILNSKNLLPAYRPNLSPPAEAGLALPPTGYRCLECGDAFSLEKSLARHYDRRSMRIEVTCNHCARRLVFFNKCSLLLHAREHKDKGLVMQCSHLVMRPVALDQMVGQPDITPLLPVAVPPVSGPLALPALGKGEGAITSSAITTVAAEAPVLPLSTEPPAAPATSAYTCFRCLECKEQCRDKAGMAAHFQQLGPPAPGATSNVCPTCPMMLPNRCSFSAHQRMHKNRPPHVCPECGGNFLQANFQTHLREACLHVSRRVGYRTPISLGAWRRLLGKGPGVPC

SEQ ID NO: 100820 - protein, 117 aa, Homo sapiens
MSQWNQVQQLEIKFLEQVDQFYDDNFPMEIRHLLAQWIENQDWEAASNNETMATILLQNLLIQLDEQLGRVSKEKNLLLIHNLKRIRKVLQSPGLATAQLPLDRHGETCIQRSKSCP

SEQ ID NO: 100821 - protein, 204 aa, Homo sapiens
  MOD_RES (1)..(1): Any amino acid
XLGNKNNYLREEECILACRGVQGGPLRGSSGAQATFPQGPSMERRHPDTSGFDELQRIHFPSDKGHCVDLPDTGLCKESIPRWYYNPFSEHCARFTYGGCYGNKNNFEEEQQCLESCRGISKKDVFGLRREIPIPSTGSVEMAVAVFLVICIVVVVAILGYCFFKNQRKDFHGHHHHPPPTPASSTVSTTEDTEHLVYNHTTRP

SEQ ID NO: 100822 - protein, 390 aa, Homo sapiens
MTSSRLWFSLLLAAAFAGRATALWPWPQNFQTSDQRYVLYPNNFQFQYDVSSAAQPGCSVLDEAFQRYRDLLFGSGSWPRPYLTGKRHTLEKNVLVVSVVTPGCNQLPTLESVENYTLTINDDQCLLLSETVWGALRGLETFSQLVWKSAEGTFFINKTEIEDFPRFPHRGLLLDTSRHYLPLSSILDTLDVMAYNKLNVFHWHLVDDPSFPYESFTFPELMRKGSYNPVTHIYTAQDVKEVIEYARLRGIRVLAEFDTPGHTLSWGPGIPGLLTPCYSGSEPSGTFGPVNPSLNNTYEFMSTFFLEVSSVFPDFYLHLGGDEVDFTCWKSNPEIQDFMRKKGFGEDFKQLESFYIQTLLDIVSSYGKGYVVWQEVFDNKVKVPLSRRLW

SEQ ID NO: 100823 - protein, 162 aa, Homo sapiens
MAPKKRPETQKTSEIVLRPRNKRSRSPLELEPEAKKLCAKGSGTACPSRRCDSDCLWVGLAGPQILPPCRSIVRTLHQHKLGRASWPSVQQGLQQSFLHTLDSYRILQKAAPFDRRATSLAWHPTHPSTVAVGSKGGDIMLWNFGIKDKPTFIKGIGAGGSI

SEQ ID NO: 100824 - protein, 87 aa, Homo sapiens
METESGPQTSNQMQTDSLSPSPNPVSPVPLNNPTSAPRYGTVIPNRIFVGGIDFKTNESDLRKFFSQYGSVKEVKIVNDRAGVSKGF

SEQ ID NO: 100825 - protein, 254 aa, Homo sapiens
MRPMRIFVNDDRHVMAKHSSVYPTQEELEAVQNMVSHTERALKAVSDWIDEQEKGSSEQAESDNMDVPPEDDSKEGAGEQKTEHMTRTLRGVMRVGLVAKGLLLKGDLDLELVLLCKEKPTTALLDKVADNLAIQLAAVTEDKYEILQSVDDAAIVIKNTKEPPLSLTIHLTSPVVREEMEKVLAGETLSVNDPPDVLDRQKCLAALASLRHAKWFQARANGLKSCVIVIRVLRDLCTRVPTWGPLRGWPLELL

SEQ ID NO: 100826 - protein, 96 aa, Homo sapiens
MAPEIHMTGPMCLIENTNGELVANPEALKILSAITQPVVVVAIVGLYRTGKSYLMNKLAGKNKGEWHEQSSAKSLLSPNTVSIHYEDVRRESWHWE

SEQ ID NO: 100827 - protein, 860 aa, Homo sapiens
MASVWQRLGFYASLLKRQLNGGPDVIKWERRVIPGCTRSIYSATGKWTKEYTLQTRKDVEKWWHQRIKEQASKISEADVINPMGWDAFGLPAENAAVERNLHPQSWTQSNIKHMRKQLDRLGLCFSWDREITTCLPDYYKWTQYLFIKLYEAGLAYQKEALVNWDPVDQTVLANEQVDEHGCSWRSGAKVEQKYLRQWFIKTTAYAKAMQDALADLPEWYGIKGMQAHWIGDCVGCHLDFTLKVHGQATGEKLTAYTATPEAIYGTSHVAISPSHRLLHGHSSLKEALRMALVPGKDCLTPVMAVNMLTQQEVPVVILAKADLEGSLDSKIGIPSTSSEDTILAQTLGLAYSEVIETLPDGTERLSSSAEFTGMTRQDAFLALTQKARGKRVGGDVTSDKLKDWLISRQRYWGTPIPIVHCPVCGPTPVPLEDLPVTLPNIASFTGKGGPPLAMASEWVNCSCPRCKGAAKRETDTMDTFVDSAWYYFRYTDPHNPHSPFNTAVADYWMPVDLYIGGKEHAVMHLFYARFFSHFCHDQKMVKHREPFHKLLAQGLIKGQTFRLPSGQYLQREEVDLTGSVPVHAKTKEKLEVTWEKMSKSKHNGVDPEEVVEQYGIDTIRLYILFAAPPEKDILWDVKTDALPGVLRWQQRLWTLTTRFIEARASGKSPQPQLLSNKEKAEARKLWEYKNSVISQVTTHFTEDFSLNSAISQLMGLSNALSQASQSVILHSPEFEDALCALMVMAAPLAPHVTSEIWAGLALVPRKLCAHYTWDASVLLQAWPAVDPEFLQQPEVVQMAVLINNKACGKIPVPQQVARDQDKVHEFVLQSELGVRLLQGRSIKKSFLSPRTALINFLVQD

SEQ ID NO: 100828 - protein, 131 aa, Homo sapiens
MVEEVQKHSVHTLVFRSLKRTHDMFVADNGKPVPLDEESHKRKMAIKLRNEYGPVLHMPTSKENLKEKGPQNATDSYVHKQYPANQGQEVEYFVAGTHPYPPGPGLMQIVLPLVEVNTDILGLLTVHSLQR

SEQ ID NO: 100829 - protein, 135 aa, Homo sapiens
MKRSEKPEGYRQMRPKTFPASNYTVSSRQMLQEIRESLRNLSKPSDAAKAEHNMSKMSTEDPRQVRNPPKFGTHHKALQEIRNSLLPFANETNSSRSTSEVNPQMLQDLQAAGFDEEDHLSVACSPISLTKPFLI

SEQ ID NO: 100830 - protein, 796 aa, Homo sapiens
MKLKKQVTVCGAAIFCVAVFSLYLMLDRVQHDPTRHQNGGNFPRSQISVLQNRIEQLEQLLEENHEIISHIKDSVLELTANAEGPPAMLPYYTVNGSWVVPPEPRPSFFSISPQDCQFALGGRGQKPELQMLTVSEELPFDNVDGGVWRQGFDISYDPHDWDAEDLQVFVVPHSHNDPGWIKTFDKYYTEQTQHILNSMVSKLQEDPRRRFLWAEVSFFAKWWDNINVQKRAAVRRLVGNGQLEIATGGWVMPDEANSHYFALIDQLIEGHQWLERNLGATPRSGWAVDPFGYSSTMPYLLRRANLTSMLIQRVHYAIKKHFAATHSLEFMWRQTWDSDSSTDIFCHMMPFYSYDVPHTCGPDPKICCQFDFKRLPGGRINCPWKVPPRAITEANVAERAALLLDQYRKKSQLFRSNVLLVPLGDDFRYDKPQEWDAQFFNYQRLFDFFNSRPNLHVQAQFGTLSDYFDALYKRTGVEPGARPPGFPVLSGDFFSYADREDHYWTGYYTSRPFYKSLDRVLEAHLRGAEVLYSLAAAHARRSGLAGRYPLSDFTLLTEARRTLGLFQHHDAITGTAKEAVVVDYGVRLLRSLVNLKQVIIHAAHYLVLGDKETYHFDPEAPFLQVDDTRLSHDALPERTVIQLDSSPRFVVLFNPLEQERFSMVSLLVNSPRVRVLSEEGQPLAVQISAHWSSATEAVPDVYQVSVPVRLPALGLGVLQLQLGLDGHRTLPSSVRIYLHGRQLSVSRHEAFPLRVIDSGTSDFALSNRYMQVWFSGLTGLLKGSGLCFLAEHPKGG

SEQ ID NO: 100831 - protein, 146 aa, Homo sapiens
MRSGKASCTLETVWEDKHKYEEAERRFYEHEATQAAASAQQLPAEGPAMNGPGQDDPEDADEAEAPDGGSRRDPRKSQDSRKPLQKKRKRSPKSGLGPADLALLGLSAERVWLDKSLFDQAESSYRQKLADVAAQAAWPPALAPWG

SEQ ID NO: 100832 - protein, 455 aa, Homo sapiens
MASTIKEALSVVSEDQSLFECAYGTPHLAKTEMTASSSSDYGQTSKMSPRVPQQDWLSQPPARVTIKMECNPSQVNGSRNSPDECSVAKGGKMVGSPDTVGMNYGSYMEEKHMPPPNMTTNERRVIVPADPTLWSTDHVRQWLEWAVKEYGLPDVNILLFQNIDGKELCKMTKDDFQRLTPSYNADILLSHLHYLRETPLPHLTSDDVDKALQNSPRLMHARNTDLPYEPPRRSAWTGHGHPTPQSKAAQPSPSTVPKTEDQRPQLDPYQILGPTSSRLANPGSGQIQLWQFLLELLSDSSNSSCITWEGTNGEFKMTDPDEVARRWGERKSKPNMNYDKLSRALRYYYDKNIMTKVHGKRYAYKFDFHGIAQALQPHPPESSLYKYPSDLPYMGSYHAHPQKMNFVAPHPPALPVTSSSFFAAPNPYWNSPTGGIYPNTRLPTSHMPSHLGTYY

SEQ ID NO: 100833 - protein, 873 aa, Homo sapiens
MGGALGPALLLTSLFGAWAGLGPGQGEQGMTVAVVFSSSGPPQAQFRARLTPQSFLDLPLEIQPLTVGVNTTNPSSLLTQICGLLGAAHVHGIVFEDNVDTEAVAQILDFISSQTHVPILSISGGSAVVLTPKEPGSAFLQLGVSLEQQLQVLFKVLEEYDWSAFAVITSLHPGHALFLEGVRAVADASHVSWRLLDVVTLELGPGGPRARTQRLLRQLDAPVFVAYCSREEAEVLFAEAAQAGLVGPGHVWLVPNLALGSTDAPPATFPVGLISVVTESWRLSLRQKVRDGVAILALGAHSYWRQHGTLPAPAGDCRVHPGPVSPAREAFYRHLLNVTWEGRDFSFSPGGYLVQPTMVVIALNRHRLWEMVGRWEHGVLYMKYPVWPRYSASLQPVVDSRHLTVATLEERPFVIVESPDPGTGGCVPNTVPCRRQSNHTFSSGDVAPYTKLCCKGFCIDILKKLARVVKFSYDLYLVTNGKHGKRVRGVWNGMIGEVYYKRADMAIGSLTINEERSEIVDFSVPFVETGISVMVARSNGTVSPSAFLEPYSPAVWVMMFVMCLTVVAITVFMFEYFSPVSYNQNLTRGKKSGGPAFTIGKSVWLLWALVFNNSVPIENPRGTTSKIMVLVWAFFAVIFLASYTANLAAFMIQEQYIDTVSGLSDKKFQRPQDQYPPFRFGTVPNGSTERNIRSNYRDMHTHMVKFNQRSVEDALTSLKMGKLDAFIYDAAVLNYMAGKDEGCKLVTIGSGKVFATTGYGIAMQKDSHWKRAIDLALLQFLGDGETQKLETVWLSGICQNEKNEVMSSKLDIDNMAGVFYMLLVAMGLALLVFAWEHLVYWKLRHSVPNSSQLDFLLAFSRVGAHPSPHRPKF

SEQ ID NO: 100834 - protein, 75 aa, Homo sapiens
MGLLQLLAFSFLALCRARVRAQEPEFSYGCAEGSCYPATGDLLIGRAQKLSVTSTCGLHKPEPYCIVSHLQVWKM

SEQ ID NO: 100835 - protein, 79 aa, Homo sapiens
MPVARSWVCRKTYVTPRRPFEKSRLDQELKLIGEYGLRNKREVWRVKFTLAKIRKAARELLTLDEKDPRRLFEGSASRW

SEQ ID NO: 100836 - protein, 215 aa, Homo sapiens
MAGSADSYTSRPSDSDVSLEEDREAIRQEREQQAAIQLERAKSKPVAFAVKTNVSYCGALDEDVPVPSTAISFDAKDFLHIKEKYNNDWWIGRLVKEGCEIGFIPSPLRLENIRIQQEQKRGRFHGGKSSGNSSSSLGEMVSGTFRATPTSTAKQKQKVTEHIPPYDVVPSMRPVVLVGPSLKGYESWKCQRDEQESGLQKSSHGHGEFPPTYTN

SEQ ID NO: 100837 - protein, 375 aa, Homo sapiens
MSLMVVSMACVGFFLLQGAWTHEGGQDKPLLSAWPSAVVPRGGHVTLLCRSRLGFTIFSLYKEDGVPVPELYNKIFWKSILMGPVTPAHAGTYRCRGSHPRSPIEWSAPSNPLVIVVTGLFGKPSLSAQPGPTVRTGENVTLSCSSRSSFDMYHLSREGRAHEPRLPAVPSVNGTFQADFPLGPATHGGTYTCFGSLHDSPYEWSDPSDPLLVSVTGNSSSSSSSPTEPSSKTGIRRHLHILIGTSVAIILFIILFFFLLHCCCSNKKNAAVMDQEPAGDRTVNREDSDDQDPQEVTYAQLDHCVFTQTKITSPSQRPKTPPTDTTMYMELPNAKPRSLSPAHKHHSQALRGSSRETTALSQNRVASSHVPAAGI

SEQ ID NO: 100838 - protein, 377 aa, Homo sapiens
MSMSPTVIILACLGFFLDQSVWAHVGGQDKPFCSAWPSAVVPQGGHVTLRCHYRRGFNIFTLYKKDGVPVPELYNRIFWNSFLISPVTPAHAGTYRCRGFHPHSPTEWSAPSNPLVIMVTGLYEKPSLTARPGPTVRTGENVTLSCSSQSSFDIYHLSREGEAHELRLPAVPSINGTFQADFPLGPATHGETYRCFGSFHGSPYEWSDASDPLPVSVTGNPSSSWPSPTEPSFKTGIARHLHAVIRYSVAIILFTILPFFLLHRWCSKKKNAAVMNQEPAGHRTVNREDSDEQDPQEVTYAQLDHCIFTQRKITGPSQRSKRPSTDTSVCIELPNAEPRALSPAHEHHSQALMGSSRETTALSQTQLASSNVPAAGI

SEQ ID NO: 100839 - protein, 163 aa, Homo sapiens
MTDCEFGYIYRLAQDYLQCVLQIPQPGSGPSKTSRVLQNVAFSVQKEVEKNLKSCLDNVNVVSVDTARTLFNQVMEKEFEDGIINWGRIVTIFAFEGILIKKLLRQQIAPDVDTYKEISYFVAEFIMNNTGEWIRQNGGWVCVMEKFFIVLSCEIEIENFLAS

SEQ ID NO: 100840 - protein, 609 aa, Homo sapiens
MIHAVLQWQKRNAAPPPSNTEAPPGETRTEAGAETRSPGKAEAESDALPDDTVIESEALPSDIAAEARAKTGGTVSDQALLFGDDDAGEGPSSLIREKPVPKQNENEEENLDKEQTGNLKQELDDKSATCKAYPKRPLLGLVLTPTRELAVQVKQHIDAVARFTGIKTAILVGGMSTQKQQRMLNRRPEIVVATPGRLWELIKEKHYHLRNLRQLRCLVVDEADRMVEKGHFAELSQLLEMLNDSQYNPKRQTLVFSATLTLVHQAPARILHKKHTKKMDKTAKLDLLMQKIGMRGKPKVIDLTRNEATVETLTETKIHCETDEKDFYLYYFLMQYPGRSLVFANSISCIKRLSGLLKVLDIMPLTLHACMHQKQRLRNLEQFARLEDCVLLATDVAARGLDIPKVQHVIHYQVPRTSEIYVHRSGRTARATNEGLSLMLIGPEDVINFKKIYKTLKKDEDIPLFPVQTKYMDVVKERIRLARQIEKSEYRNFQACLHNSWIEQAAAALEIELEEDMYKGGKADQQEERRRQKQMKVLKKELRHLLSQPLFTESQKTKYPTQSGKPPLLVSAPSKSESALSCLSKQKKKKTKKPKEPQPEQPQPSTSAN

SEQ ID NO: 100841 - protein, 126 aa, Homo sapiens
MAIFSVYVVNKAGGLIYQLDSYAPRAEAEKTFSYPLDLLLKLHDERVLVAFGQRDGIRGIKFVVLADPRQAGIDSLLRKIYEIYSDFALKNPFYSLEMPIRCELFDQNLKLALEVAEKAGTFGPGS

SEQ ID NO: 100842 - protein, 707 aa, Homo sapiens
MPLGRLAGSARSEEGSEAFLEGMVDWELSRLQRQCKVMEGERRAYSKEVHQRINKQLEEIRRLEEVRGDLQVQISAAQNQVKRLRDSQRLENMDRLLKGRAQVQAEIEELQEQTRALDKQIQEWETRIFTHSKNVRSPGFILDQKVKIRRRIRILENQLDRVTCHFDNQLVRNAALREELDLLRIDRNRYLNVDRKLKKEIHHLHHLVSTLILSSTSAYAVREEAKAKMGLLRERAEKEEAQSEMEAQVLQRQILHLEQLHHFLKLKNNDRQPDPDVLEKREKQAGEVAEGVWKTSQERLVLCYEDALNKLSQLMGESDPDLLVQKYLEIEERNFAEFNFINEQNLELEHVQEEIKEMQEALVSARASKDDQHLLQEQQQKVLQQRMDKVHSEAERLEARFQDVRGQLEKLKADIQLLFTKAHCDSSMIDDLLGVKTSMGDRDMGLFLSLIEKRLVELLTVQAFLHAQSFTSLADAALLVLGQSLEDLPKKMAPLQPPDTLEDPPGFEASDDYPMSREELLSQVEKLVELQEQAEAQRQKDLAAAAAKLDGTLSVDLASTQRAGSSTVLVPTRHPHAIPGSILSHKTSRDRGSLGHVTFGGLSSSTGHLPSHITHGDPNTGHVTFGSTSASSGGHVTFRPVSASSYLGSTGYVGSSRGGENTEGGVESGGTASDSSGGLGSSRDHVSSTGPASSTGPGSSTSKDSRG

SEQ ID NO: 100843 - protein, 107 aa, Homo sapiens
MGSWVQLITSVGTSGLFLGVRVREEGAGMRCSKTIQAGQWLDSSKGPLGPSPPPVPTAGYSSSFCVHYVNLLPGVLVLSVTSQYPHLSMALCQLAAHDWPRLSCVCV

SEQ ID NO: 100844 - protein, 946 aa, Homo sapiens
MSTERDSETTFDEDSQPNDEVVPYSDDETEDELDDQGSAVEPEQNRVNREAEENREPFRKECTWQVKANDRKYHEQPHFMNTKFLCIKESKYANNAIKTYKYNAFTFIPMNLFEQFKRAANLYFLALLILQAVPQISTLAWYTTLVPLLVVLGVTAIKDLVDDVARHKMDKEINNRTCEVIKDGRFKVAKWKEIQVGDVIRLKKNDFVPADILLLSSSEPNSLCYVETAELDGETNLKFKMSLEITDQYLQREDTLATFDGFIECEEPNNRLDKFTGTLFWRNTSFPLDADKILLRGCVIRNTDFCHGLVIFAGADTKIMKNSGKTRFKRTKIDYLMNYMVYTIFVVLILLSAGLAIGHAYWEAQVGNSSWYLYDGEDDTPSYRGFLIFWGYIIVLNTMVPISLYVSVEVIRLGQSHFINWDLQMYYAEKDTPAKARTTTLNEQLGQIHYIFSDKTGTLTQNIMTFKKCCINGQIYGDHRDASQHNHNKIEQVDFSWNTYADGKLAFYDHYLIEQIQSGKEPEVRQFFFLLAVCHTVMVDRTDGQLNYQAASPDEGALVNAARNFGFAFLARTQNTITISELGTERTYNVLAILDFNSDRKRMSIIVRTPEGNIKLYCKGADTVIYERLHRMNPTKQETQDALDIFANETLRTLCLCYKEIEEKEFTEWNKKFMAASVASTNRDEALDKVYEEIEKDLILLGATAIEDKLQDGVPETISKLAKADIKIWVLTGDKKETAENIGFACELLTEDTTICYGEDINSLLHARMENQRNRGGVYAKFAPPVQESFFPPGGNRALIITGSWLNEILLEKKTKRNKILKLKFPRTEEERRMRTQSKRRLEAKKEQRQKNFVDLACECSAVICCRVTPKQKAMVVDLVKRYKKAITLAIGDGANDVNMIKISSSSLMYTKNIPTLSSSTGVSCMTCPHWRWNKWTRRNASCHVE

SEQ ID NO: 100845 - protein, 208 aa, Homo sapiens
MFEFLSNHMRDAQGRLDSTRGLLCGLGAGVAEAVVVVCPMETIKVKFIHDQTSPNPKYRGFFHGVREIVREQGLKGTYQGLTATVLKQGSNQAIRFFVMTSLRNWYRGDNPNKPMNPLITGVFGAIAGAASVFGNTPLDVIKTRMQGLEAHKYRNTWDCGLQILKKEGLKAFYKGTVPRLGRVCLDVAIVFVIYDEVVKLLNKVWKTD

SEQ ID NO: 100846 - protein, 461 aa, Homo sapiens
MGQVLPVFAHCKEAPSTASSTPDSTEGGNDDSDFRELHTAREFSEEDEEETTSQDWGTPRELTFSYIAFDGVVGSGGRRDSTARRPRPQGRSVSEPRDQHPQPSLGDSLESIPSLSQSPEPGRRGDPDTAPPSERPLEDLRLRLDHLGWVARGTGSGEDSSTSSSTPLEDEEPQEPNRLETGEAGEELDLRLRLAQPSSPEVLTPQLSPGSGTPQAGTPSPSRSRDSNSGPEEPLLEEEEKQWGPLEREPVRGQCLDSTDQLEFTVEPRLLGTAMEWLKTSLLLAVYKTVPILELSPPLWTAIGWVQRGPTPPTPVLRVLLKWAKSPRSSGVPSLSLGADMGSKVADLLYWKDTRTSGVVFTGLMVSLLCLLHFSIVSVAAHLALLLLCGTISLRVYRKVLQAVHRGDGANPFQAYLDVDLTLTREQTERLSHQITSRVVSAATQLRHFFLVEDLVDSLKE

SEQ ID NO: 100847 - protein, 414 aa, Homo sapiens
MVPWVRTMGQKLKQRLRLDVGREICRQYPLFCFLLLCLSAASLLLNRYIHILMIFWSFVAGVVTFYCSLGPDSLLPNIFFTIKYKPKQLGLQELFPQGHSCAVCGKVKCKRHRPSLLLENYQPWLDLKISSKVDASLSEVLELVLENFVYPWYRDVTDDESFVDELRITLRFFASVLIRRIHKVDIPSIITKKLLKAAMKHIEVIVKARQKVKNTEFLQQAALEEYGPELHVALRSRRDELHYLRKLTELLFPYILPPKATDCRSLTLLIREILSGSVFLPSLDFLADPDTVNHLLIIFIDDSPPEKATEPASPLVPFLQKFAEPRNKKPSVLKLELKQIREQQDLLFRFMNFLKQEGAVHVLQFCLTRNLMIEFYDQNYQMMKCCLFMKNCRRFIKHTVWMKVLTKLDLIPSL

SEQ ID NO: 100848 - protein, 67 aa, Homo sapiens
MDHHVSTIKPRRIQNQNVIHRLERRRISSGKTRHLLKSMSTRAARQQRTYCRDTKEKSCPMAMTSGQ

SEQ ID NO: 100849 - protein, 522 aa, Homo sapiens
MTETEIVTSLCPMYGSRFGYALSNGTVGVYDKTSRYWRIKSKNHAMSIHAFDLNSDGVNELITGWSNGKVDARSDRTGEVIFKDNFSSAIAGVVEGDYRMDGHIQLICCSVDGEIRGYLPGTAEMRGNLMDTSAEQDLIRELSQKKQNLLLELRNYEENAKAELASPLNEADGHRGIIPANTRLHTTLSVSLGNETQTAHTELRISTSNDTIIRAVLIFAEGIFTGESHVVHPSIHNLSSSICIPIVPPKDVPVDLHLKAFVGYRSSTQFHVFESTRQLPRFSMYALTSLDPASEPISYVNFTIAERAQRVVVWLGQNFLLPEDTHIQNAPFQVCFTSLRNGGHLHIKIKLSGEITINTDDIDLAGDIIQSMASFFAIEDLQVEADFPVYFEELRKVLVKVDEYHSVHQKLSADMADHSNLIRSLLVGAEDARLMRDMKTMKSRYMELYDLNRDLLNGYKIRCNNHTELLGNLKAVNQAIQRAGRLRVGKPKNQVITACRDAIRSNNINTLFKIMRVGTASS

SEQ ID NO: 100850 - protein, 184 aa, Homo sapiens
MEERKVKRRSPKSFSAHCTQVVNAKKNAIPVSKSTGFSNPASQSTSQRPKLKRVMKEKTKPQGGEGKGAQSTPIQHSFLTDVSDVQEMERGLLSLLNDFHSGKLQAFGNECSIEQMEHVRGMQEKLARLNLELYGELEELPEDKRKTASDSNLDRLLSDLEELNSSIQKLHLADAQDVPNTSAS

SEQ ID NO: 100851 - protein, 173 aa, Homo sapiens
MLLVDADQPEPMRSGARELALFLTPEPGAEAKEVEETIEGMLLRLEEFCSLADLIRSDTSQILEENIPVLKAKLTEMRGIYAKVDRLEAFVKMVGHHVAFLEADVLQAERDHGAFPQALRRWLGSAGLPSFRNKSPAPVPVTYELPTLYRTEDYFPVDAGEAQHHPRTCPRPL

SEQ ID NO: 100852 - protein, 415 aa, Homo sapiens
MQRSIMSFFHPKKEGKAKKPEKEASNSSRETEPPPKAALKEWNGVVSESDSPVKRPGRKAARVLGSEGEEEDEALSPAKGQKPALDCSQVSPPRPATSPENNASLSDTSPMDSSPSGIPKRRTEEETPKESLTEAEVATEKEGEDGDQPTTPPKPLKTSKAETPTESVSEPEVATKQELQEEEEQTKPPRRAPKTLSSFFTPRKPAVKKEVKEEEPGAPGKEGAAEGPLDPSGYNPAKNNYHPVEDACWKPGQKVPYLAVARTFEKIEEVSARLRMVETLSNLLRSVVALSPPDLLPVLYLSLNHLGPPQQGLELGVGDGVLLKAVAQATGRERRETRSHNCHPRHPHPRSPLKVGSWSPSGLRQPRKATWGWWPRTAAAPRGSCCHHLRSLPPGSSASSATSPGSLAVLPQPRR

SEQ ID NO: 100853 - protein, 620 aa, Homo sapiens
MASTDYSTYSQAAAQQGYSAYTAQPTQGYAQTTQAYGQQSYGTYGQPTDVSYTQAQTTATYGQTAYATSYGQPPTGYTTPTAPQAYSQPVQGYGTGAYDTTTATVTTTQASYAAQSAYGTQPAYPAYGQQPAATAPTRPQDGNKPTETSQPQSSTGGYNQPSLGYGQSNYSYPQVPGSYPMQPVTAPPSYPPTSYSSTQPTSYDQSSYSQQNTYGQPSSYGQQSSYGQQSSYGQQPPTSYPPQTGSYSQAPSQYSQQSSSYGQQIYFVGSGRTKNGFETRAFSSLHGFQSAGERGGFNKPGGPMDEGPDLDLGPPVDPDEDSDNSAIYVQGLNDSVTLDDLADFFKQCGVVKMNKRTGQPMIHIYLDKETGKPKGDATVSYEDPPTAKAAVEWFDGKDFQGSKLKVSLARKKPPMNSMRGGLPPREGRGMPPPLRGGPGGPGGPGGPMGRMGGRGGDRGGFPPRGPRGSRGNPSGGGNVQHRAGDWQCPNPGCGNQNFAWRTECNQCKAPKPEGFLPPPFPPPGGDRGRGGPGGMRGGRGGLMDRGGPGGMFRGGRGGDRGGFRGGRGMDRGGFGGGRRGGPGGPPGPLMEQMGGRRGGRGGPGKMDKGEHRQERRDRPY

SEQ ID NO: 100854 - protein, 392 aa, Homo sapiens
MMQLRQLDMKRITEEERRMASVLAKKEEEKKRESHKQSLLKEKKRLTINNVARQWDLQQQRVANIATNEDRKDSDSPQDPCQIDGSTLSAFPEETGPLDSGLNNALQGLSVIDTYLVEVDGDTLSLYGSGALESLDRNWSVQTAGMITTVSFTFIEFDEIVQVLPKLKIKFPNSLHLKFKETNLVMLQQFNALAQLRRIDQLTIDPQGNPVVNFTLWKYYVLFRLSHFSMQKINGTEVTQNDMIMAERLFGILAHVASSELPQYRLISILGDARKKQFRYLLESKGKKPGIINEENNDSKRLVGENTNRATLNYTTRDFYNEKLEEIKEKKKFCKTYIEDLVKEATEINMKNEALQKLWPQMFIELVRDAVIEIRNKNSYMKLCLQQITDQK

SEQ ID NO: 100855 - protein, 127 aa, Homo sapiens
MAELQEVQITEEKPLLPGQTPEAAKTHSVETPYGSVTFTVYGTPKPKRPAILTYHDVGLNYKSCFQPLFQFEDMQEIIQNFVRVHVDAPGMEEGAPVFPLGYQYPSLDQLADMIPCVLQYLNFSTII

SEQ ID NO: 100856 - protein, 411 aa, Homo sapiens
  MOD_RES (1)..(1): Any amino acid
XRDEDDEAYGKPVKYDPSFRGPIKNRSCTDVICCVLFLLFILGYIVVGIVAWLYGDPRQVLYPRNSTGAYCGMGENKDKPYLLYFNIFSCILSSNIISVAENGLQCPTPQVCVSSCPEDPWTVGKNEFSQTVGEVFYTKNRNFCLPGVPWNMTVITSLQQELCPSFLLPSAPALGRCFPWTNVTPPALPGITNDTTIQQGISGLIDSLNARDISVKIFEDFAQSWYWILVAVGQMMSTMFYPLVTFVLLLICIAYWAMTALYLATSGQPQYVLWASNISSPGCEKVPINTSCNPTAHLVNSSCPGLMCVFQGYSSKGLIQRSVFNLQIYGVLGLFWTLNWVLALGQCVLAGAFASFYWAFHKPQDIPTFPLISAFIRTLRYHTGSLAFGALILTLVQIARVILEYIDHKLR

SEQ ID NO: 100857 - protein, 74 aa, Homo sapiens
MAKDILGEAGLHFDELNKLRVLDPEVTQQTIELKEECKDFVDKIGQFQKIVGGLIELVDQLAKEAENEKMKVSG

SEQ ID NO: 100858 - protein, 136 aa, Homo sapiens
MGLTSQLLPPLFFLLACAGNFVHGHKCDITLQEIIKTLNSLTEQKTLCTELTVTDIFAASKQHACLPTSRHTGTICRPPSARVPSTSTRLQSPERTQLRRKPSAGLRLCSGSSTATMRRTLAAWVRLHSSSTGTSS

SEQ ID NO: 100859 - protein, 236 aa, Homo sapiens
MAALGHLAGEAAAAPGPGTPCASRGARLPGPVSSARNPSTVCLCPEQPTCSNADSRAHPLGDEGGTASKKQKNKKKTRNRASVANGGEKASEKLAPEEVPLSAEAQAQQLAQELAWCVEQLELGLKRQKPTPKQKEQAIGAIRTLRSKRTPLPRKRQLMHSLFGDYRAQMEAEWREALRALRAAAYSAQVQPVDGATRKKSQRVCRPRSIWRAKATLDMPDEEFRTLKNLLRCSSP

SEQ ID NO: 100860 - protein, 535 aa, Homo sapiens
MCNPEEAALLRLEEVFSATLAHVNSLVLQPLLPAAPDPSDPWGRECLRLLQQLHKSSQQLWEVTEESLHSLQERLRYPDSTGLESLLLLRGADRVLQAHIEYIESYTSCMVVQAFQKAAKRRSEYWRGQRKALRQLLSGVSSEGSVGASLGQALHQPLAHHVQQYVLLLLSLGDTIGEHHPTRELVVNAVTLFGNLQSFMKQELDQAVATQALWHTLRGRLRDVLCTPAHRLLQDSQDVPVTVAPLRAERVLLFDDALVLLQGHNVHTFDLKLVWVDPGQDGCTFHLLTPEEEFSFCAKDSQGQAVWQWKVTWAVHQALHGKKDFPVLGAGLEPSQPPDCRCAEYTFQAEGRLCQATYEGEWCRGRPHGKGTLKWPDGRNHVGNFCQGLEHGFGIRLLPQASEDKFDCYKCHWREGSMCGYGICTAPTRCTRATSRRACGTDLGSLRVVRRPPSPSGTRATGRGARGAAMALRRMVTEVSATLACGRLVSATAQGSWSPRQVSATRAPSRRTRRWARASSSLKTTPCMRAPSPGT

SEQ ID NO: 100861 - protein, 183 aa, Homo sapiens
MVPWVRTMGQKLKQRLRLDVGREICRQYPLFCFLLLCLSAASLLLNRYIHILMIFWSFVAGVVTFYCSLGPDSLLPNIFFTIKYKPKQLGLQELFPQGHSCAVCGKVKCKRHRPSLLLENYQPWLDLKISSKVDASLSEVLELVLENFVYPWYRDVTDDESFVDELRITLRFFASVLIRRIHK

SEQ ID NO: 100862 - protein, 220 aa, Homo sapiens
MRTKAAGCAERRPLQPRTEAAAAPAGRAMPSEYTYVKLRSDCSRPSLQWYTRAQSKMRRPSLLLKDILKCTLLVFGVWILYILKLNYTTEECDMKKMHYVDPDHVKTLSPCGWHCVQLIMARWTQPLLHRLLSDSADLHRAFKGSRALPAEAFSEPRHQHLQTESFLSLVLLPAFQAFLGYLRAPEGAALALRHFLLSCELWASSGGGREQLKQMPVQLT

SEQ ID NO: 100863 - protein, 91 aa, Homo sapiens
MAANVGDQRSTDWSSQYSMVAGAGRENGMETPMHENPEWEKARQALASISKSGAAGGSAKSSSNGPVASAQYVSQAEASALQQQQYYQWYQ

SEQ ID NO: 100864 - protein, 132 aa, Homo sapiens
MSQVTFSDVAIDFSHEEWACLDSAQRDLYKDVMVQNYENLVSVAGLSVTKPYVIMLLEDGKEPWMMEKKLSKAYPFPLSHSVPASVNFGFSALFEHCSEVTEIFELSELCVFWVLHFLSNSPNSTVEAFFKK

SEQ ID NO: 100865 - protein, 395 aa, Homo sapiens
MSYTGFVQGSETTLQSTYSDTSAQPTCDYGYGTWNSGTNRGYEGYGYGYGYGQDNTTNYGYGMATSHSWEMPSSDTNANTSASGSASADSVLSRINQRLDMVPHLETDMMQGGVYGSGGERYDSYESCDSRAVLSERDLYRSGYDYSELDPEMEMAYEGQYDAYRDQFRMRGNDTFGPRAQGWARDARSGRPMASGYGRMWEDPMGARGQCMSGASRLPSLFSQNIIPEYGMFQGMRGGGAFPGGSRFGFGFGNGMKQMRRTWKTWTTADFRTKKKKRKQGGSPDEPDSKATRTDCSDNSDSDNDEGTEGEATEGLEGTEAVEKGSRVDGEDEEGKEDGREEGKEDPEKVTRSSKSSVAGVRSGTLGAVFTALVCVSSPLAPLQPLLGFRVPPPE

SEQ ID NO: 100866 - protein, 38 aa, Homo sapiens
ELCPSPQFIVGGATRTDICQGGLETRWMRIGLVGFRSN

SEQ ID NO: 100867 - protein, 74 aa, Homo sapiens
MNCCIGLGEKARGSHRASYPSLSALFTEASILGFGSFAVKAQVGNQQLGGPEWIRFSLTPRPLNCSLSLTPRWG

SEQ ID NO: 100868 - protein, 377 aa, Homo sapiens
MKALRLSASALFCLLLINGLGAAPPGRPEAQPPPLSSEHKEPVAGDAVPGPKDGSAPEVRGARNSEPQDEGELFQGVDPRALAAVLLQALDRPASPPAPSGSQQGPEEEAAEALLTETVRSQTHSLPAPESPEPAAPPRPQTPENGPEASDPSEELEALASLLQELRDFSPSSAKRQQETAAAETETRTHTLTRVNLESPGPERVWRASWGEFQARVPERAPLPPPAPSQFQARMPDSGPLPETHKFGEGVSSPKTHLGEALAPLSKAYQGVAAPFPKARRPESALLGGSEAGERLLQQGLAQVEAGRRQAEATRQAAAQEERLADLASDLLLQFAAGRGPAARPCPLALPLSPGCVGTCQTPLPGPEPELPELTRG

SEQ ID NO: 100869 - protein, 347 aa, Homo sapiens
MSASAPAAEGEGTPTQPASEKEPEMPGPREESEEEEDEDDEEEEEEEKEKSLIVEGKREKKKVERIHFFLSKKKTDELRNLHKLLYNRPGTVSSLKKNVGQFSGFPFEKGSVQYKKKEEMLKKFRNAMLKSICEVLDLERSGVNSELVKRILNFLMHPKPSGKPLPKSKKTCSKGSKKERNSSGMARKAKRTKCPEILSDESSSDEDEKKNKEESSDDEDKESEEEPPKKTAKREKPKQKATSKSKKSVKSANVKKADSSTTKKNQNSSKKESESEDSSDDEPLIKKLKKPPTDEELKETIKKLLASANLEEVTMKQICKKVYENYPTYDLTERKDFIKTTVKELIS

SEQ ID NO: 100870 - protein, 86 aa, Homo sapiens
MGLDKMKKTACGFCFVEYYSRADAENAMRYINGTRLDDRIIRTDWDAGFKEGRQYGRGRSGGQVRDEYRQDYDAGRGGYGKLAQNQ

SEQ ID NO: 100871 - protein, 166 aa, Homo sapiens
MPEPSKSAPAPKKGSKKAVTKAQKKDGKKRKRSRKESYSVYVYKVLKQVHPDTGISSKAMGIMNSFVNDIFERIAGEASRLAHYNKRSTITSREIQTAVRLLLPGELAKHAVSEGTKAVTKYTSSKKRKRRFTESIKKAHGFRKLKIWLKLRVSNQSPDDIYIARD

SEQ ID NO: 100872 - protein, 239 aa, Homo sapiens
MASLQRKGLQARILTSEEEEKLKRDQTLVSDFKQQKLEQEAQKNWDLFYKRNSTNFFKDRHWTTREFEELRSCREQNPLYDTERCKVFQCDLTKDDLLDHVPPESVDVVMLIFVLSAVHPDKMHLVLQNIYKVLKPGKSVLFRDYGLYDHAMLRFKASSKLGENFYVRQDGTRSYFFTDDFLAQLFMDTGYEEVVNEYVFRETVNKKEGLCVPRVFLQSKFLKPPKNPSPVVLGLDPKS

SEQ ID NO: 100873 - protein, 358 aa, Homo sapiens
MVLSLKEGAREEDLDAVEAQIGCKLPDDYRCSYRIHNGQKLVVPGLLGSMALSNHYRSEDLLDVDTAAGGFQQRQGLKYCLPLTFCIHTGLSQYIAVEAAEGRNKNEVFYQCPDQMARNPAAIDMFIIGATFTDWFTSYVKNVVSGGFPIIRDQIFRYVHDPECVATTGDITVSVSTSFLPELSSVHPPHYFFTYRIRIEMSKDALPEKACQLDSRYWRITNAKGDVEEVQGPGVVGEFPIISPGRVYEYTSCTTFSTTSGYMEGYYTFHFLYFKDKIFNVAIPRFHMACPTFRVSIARLEMGPDEYEEMEEEEEEEEEEDEDDDSADMDESDEDDEEERRRRVFDVPIRRRRCSRLF

SEQ ID NO: 100874 - protein, 139 aa, Homo sapiens
MIPPGECTYAGRKRRRPLQKQRPAVGAEKSNPSKRHRDRLNAELDHLASLLPFPPDIISKLDKLSVLRLSVSYLRVKSFFQGQGLAVADAEDVDDHTGERRPMSFRRPRALDTQALRRTQFGLHLLMVNIAGLIATDRL

SEQ ID NO: 100875 - protein, 487 aa, Homo sapiens
METPSQRRATRSGAQASSTPLSPTRITRLQEKEDLQELNDRLAVYIDRVRSLETENAGLRLRITESEEVVSREVSGIKAAYEAELGDARKTLDSVAKERARLQLELSKVREEFKELKARNTKKEGDLIAAQARLKDLEALLNSKEAALSTALSEKRTLEGELHDLRGQVAKLEAALGEAKKQLQDEMLRRVDAENRLQTMKEELDFQKNIYSEELRETKRRHETRLVEIDNGKQREFESRLADALQELRAQHEDQVEQYKKELEKTYSAKLDNARQSAERNSNLVGAAHEELQQSRIRIDSLSAQLSQLQKQLAAKEAKLRDLEDSLARERDTSRRLLAEKEREMAEMRARMQQQLDEYQELLDIKLALDMEIHAYRKLLEGEEERLRLSPSPTSQRSRGRASSHSSQTQGGGSVTKKRKLESTESRSSFSQHARTSGNSLRTALINSTGEEVAMRKLVRSVTVVEDDEDEDGDDLLHHHHVSGSRR

SEQ ID NO: 100876 - protein, 13 aa, Homo sapiens
FETNSECSKPGVM

SEQ ID NO: 100877 - protein, 85 aa, Homo sapiens
MAAASSSDSDACGAESNEANSKWLDAHYDPMANIHTFSACLAGGRGPWPWWAAAPPEGAQRTTGDDRKPATCSASCCCHLPHGAT

SEQ ID NO: 100878 - protein, 59 aa, Homo sapiens
MKNYKAIGKIGEGTFSEVMKMQSLRDGNYYACKQMKQRFEREKIPIIRKKNYALYVPVM

SEQ ID NO: 100879 - protein, 181 aa, Homo sapiens
MQPLSKLMAISKPRNLSLREQREVLRADMSWQQETNPVVETHDSEASRQKFRHFQYLKVSGPHEALSQLWELCLQWLRPEIHTKKQIIELLVLEQFLAILPEEVRTWVNLQHPNNSKDMVTLIEDVIEMLEDEDMPCKDSALQMGSIKEKMKAGSRTGKPQHIYFPNHLRALSWRVRKKDG

SEQ ID NO: 100880 - protein, 85 aa, Homo sapiens
MSSSMWYIMQSIQSKYSLSERLIRTIAAIRSFPHDNVEDLIRGGADVNCTHGTLKPLHCACMVSDADCVELLLEKGAEDSLGVAC

SEQ ID NO: 100881 - protein, 52 aa, Homo sapiens
MSGMEATVRPGIGARPPFHSLPLRRTNYDPGALQESVPSQSGKTSHMGLLEV

SEQ ID NO: 100882 - protein, 35 aa, Homo sapiens
LKSCMGLKIGDTVRWAGQGLCPGASVGTQPPFFLL

SEQ ID NO: 100883 - protein, 39 aa, Homo sapiens
MPPKDDKKKKDAGKSAKKDKDPVNKSGGKAKKKVEIRPL

SEQ ID NO: 100884 - protein, 220 aa, Homo sapiens
MSRYLLPLSALGTVAGAAVLLKDYVTGGACPSKATIPGKTVIVTGANTGIGKQTALELARRGGNIILACRDMEKCEAAAKDIRGETLNHHVNARHLDLASLKSIREFAAKIIEEEERVDILINNAGVMRCPHWTTEDGFEMQFGVNHLGHFLLTNLLLDKLKASAPSRIINLSSLAHVAGHIDFDDLNWQTRKYNTKAAYCQSKLAIVLFTKELSRRLQG

SEQ ID NO: 100885 - protein, 377 aa, Homo sapiens
MDELFPLIFPAEPAQASGPYVEIIEQPKQRGMRFRYKCEGRSAGSIPGERSTDTTKTHPTIKINGYTGPGTVRISLVTKDPPHRPHPHELVGKDCRDGFYEAELCPDRCIHSFQNLGIQCVKKRDLEQAISQRIQTNNNPFQVPIEEQRGDYDLNAVRLCFQVTVRDPSGRPLRLPPVLSHPIFDNRAPNTAELKICRVNRNSGSCLGGDEIFLLCDKVQKEDIEVYFTGPGWEARGSFSQADVHRQVAIVFRTPPYADPSLQAPVRVSMQLRRPSDRELSEPMEFQYLPDTDDRHRIEEKRKRTYETFKSIMKKSPFSGPTDPRPPPRRIAVPSRSSASVPKPGKDFLLSHWNDRFSSVQLRSSGDEDSWAPLQTY

SEQ ID NO: 100886 - protein, 576 aa, Homo sapiens
MADANKAEVPGATGGDSPHLQPAEPPGEPRREPHPAEAEKQQPQHSSSSNGVKMENDESAKEEKSDLKEKSTGSKKANRFHPYSKDKNSGAGEKKGPNRNRVFISNIPYDMKWQAIKDLMREKVGEVTYVELFKDAEGKSRGCGVVEFKDEEFVKKALETMNKYDLSGRPLNIKEDPDGENARRALQRTGGSFPGGHVPDMGSGLMNLPPSILNNPNIPPEVISNLQAGRLGSTIFVANLDFKVGWKKLKEVFSIAGTVKRADIKEDKDGKSRGMGTVTFEQAIEAVQAISMFNGQFLFDRPMHVKMDDKSVPHEEYRSHDGKTPQLPRGLGGIGMGLGPGGQPISASQLNIGGVMGNLGPGGMGMDGPGFGGMNRIGGGIGFGGLEAMNSMGGFGGVGRMGELYRGAMTSSMERDFGRGDIGINRGFGDSFGRLGGGMGSMNSVTGGMGMGLDRMSSSFDRMGPGIGAILERSIDMDRGFLSGPMGSGMRERIGSKGNQIFVRNLPFDLTWQKLKEKFSQCGHVMFAEIKMENGKSKGCGTVRFDSPESAEKACRIMNGIKISGREIDVRLDRNA

SEQ ID NO: 100887 - protein, 424 aa, Homo sapiens
MQGARAPRDQGQSPGRMSALGRSSVILLTYVLAATELTCLFMQFSIVPYLSRKLGLDSIAFGYLQTTFGVLQLLGGPVFGRFADQRGARAALTLSFLAALALYLLLAAASSPALPGVYLLFASRLPGALMHTLPAAQMVITDLSAPEERPAALGRLGLCFGVGVILGSLLGGTLVSAYGIQCPAILAALATLLGAVLSFTCIPASTKGAKTDAQAPLPGGPRASVFDLKAIASLLRLPDVPRIFLVKVASNCPTGLFMVMFSIISMDFFQLEAAQAGYLMSFFGLLQMVTQGLVIGQLSSHFSEEVLLRASVLVFIVVGLAMAWMSSVFHFCLLVPGLVFSLCTLNVVTDSMLIKAVSTSDTGTMLGLCASVQPLLRTLGPTVGGLLYRSFGVPVFGHVQVAINTLVLLVLWRKPMPQRKDKVR

SEQ ID NO: 100888 - protein, 37 aa, Homo sapiens
  MOD_RES (1)..(1): Any amino acid
XAQGNPQQGFFSSFFTSNQKCQLRLLKTLETNSFVPE

SEQ ID NO: 100889 - protein, 187 aa, Homo sapiens
MATNFLAHEKIWFDKFKYDDAERRFYEQMNGPVAGASRQSSGPGASSGTSGDHGELVVRIASLEVENQSLRGVVQELQQAISKLEARLNVLEKSSPGHRATAPQTQHVSPMRQVEPPAKKPATPAEDDEDDDIDLFGSDNEEEDKEAAQLREERLRQYAEKKAKKPALVAKSSILLDVKPWDDETDM

SEQ ID NO: 100890 - protein, 51 aa, Homo sapiens
MTAEEMKATESGAQSAPLPMEGVDISPKQDEGVLKIIGDLKRLLQRLSCGM

SEQ ID NO: 100891 - protein, 111 aa, Homo sapiens
MATSRYEPVAEIGVGAYGTVYKARDPHSGHFVALKSVRVPNGGGGGGGLPISTVREVALLRRLEAFEHPNVVRLMDVCATSRTDREIKRCFVESLSSVETLKPTSWAKSLT

SEQ ID NO: 100892 - protein, 123 aa, Homo sapiens
MGDGAVKQGFLYLQQQQTFGKKWRRFGASLYGGSDCALARLELQEGPEKPRRCEAARKVIRLSDCLRVAEAGGEASSPRDTSAFFLETKERLYLLAAPAAERGDWVQAICLLAFPSAPTRNLL

SEQ ID NO: 100893 - protein, 46 aa, Homo sapiens
MRPQDSTGVAELQEPGLPLTDDAPPGATEEPAAAEAAGAPDRATLL

SEQ ID NO: 100894 - protein, 231 aa, Homo sapiens
MEPPGDWGPPPWRSTPKTDVLRLVLYLTFLGAPCYAPALPSCKEDEYPVGSECCPKCSPGYRVKEACGELTGTVCEPCPPGTYIAHLNGLSKCLQCQMCDPAMGLRASRNCSRTENAVCGCSPGHFCIVQDGDHCAACRAYATSSPGQRVQKGGTESQDTLCQNCPPGTFSPNGTLEECQHQTKCSWLVTKAGAGTSSSHWVWWFLSGSLVIVIVCSTVGLIICVKRRKPR

SEQ ID NO: 100895 - protein, 65 aa, Homo sapiens
MRFSVSLARKIKTFATKMVITSENDEDRGGQEKESKEESVLAMLGIIGTILNLIVIIFVYIYTTL

SEQ ID NO: 100896 - protein, 101 aa, Homo sapiens
MAGQAFRKFLPLFDRVLVERSAAETVTKGGIMLPEKSQGKVLQATVVAVGSGSKGKGGEIQPVSVKVGDKVLLPEYGGTKVVLDDKVCKLNNSKKKSDICN

SEQ ID NO: 100897 - protein, 516 aa, Homo sapiens
MHSETPKSQVGTLLFRSRSRLTHLSLSRRASESSLSSESSESSDAGLCMDSPSPMDPHMAEQTFEQAIQAASRIIRNEQFAIRRFQSMPVRLLGHSPVLRNITNSQAPDGRRKSEAGSGAASSSGEDKENDGFVFKMPWKPTHPSSTHALAEWASRREAFAQRPSSAPDLMCLSPDRKMEVEELSPLALGRFSLTPAEGDTEEDDGFVDILESDLKDDDAVPPGMESLISAPLVKTLEKEEEKDLVMYSKCQRLFRSPSMPCSVIRPILKRLERPQDRDTPVQNKRRRSVTPPEEQQEAEEPKARVLRSKSLCHDEIENLLDSDHRELIGDYSKAFLLQTVDGKHQDLKYISPETMVALLTGKFSNIVDKFVIVDCRYPYEYEGGHIKTAVNLPLERDAESFLLKSPIAPCSLDKRVILIFHCEFSSERGPRMCRFIRERDRAVNDYPSLYYPEMYILKGGYKEFFPQHPNFCEPQDYRPMNHEAFKDELKTFRLKTRSWAGERSRRELCSRLQDQ

SEQ ID NO: 100898 - protein, 67 aa, Homo sapiens
MPSPRLQHSKPPRRLSRAQKHSSGSSNTSTANRSTHNELEKNRLKNWLVGRRDTRGMKMLLKAIAVI

SEQ ID NO: 100899 - protein, 178 aa, Homo sapiens
METFPLLLLSLGLVLAEASESTMKIIKEEFTDEEMQYDMAKSGQEKQTIEILMNPILLVKNTSLSMSKDDMSSTLLTFRSLHYNDPKGNSSGNDKECCNDMTVWRKVSEANGSCKWSNNFIRSSTEVMRRVHRAPSCKFVQNPGISCCESLELENTVCQFTTGKQFPRCQYHSVTSLE

SEQ ID NO: 100900 - protein, 460 aa, Homo sapiens
MMEALGFLKLEVNGPMVTVALSVALLALLKWYSTSAFSRLEKLGLRHPKPSPFIGNLTFFRQGFWESQMELRKLYGPLCGYYLGRRMFIVISEPDMIKQVLVENFSNFTNRMASGLEFKSVADSVLFLRDKRWEEVRGALMSAFSPEKLNEMVPLISQACDLLLAHLKRYAESGDAFDIQRCYCNYTTDVVASVAFGTPVDSWQAPEDPFVKHCKRFFEFCIPRPILVLLLSFPSIMVPLARILPNKNRDELNGFFNKLIRNVIALRDQQAAEERRRDFLQMVLDARHSASPMGVQDFDIVRDVFSSTGCKPNPSRQHQPSPMARPLTVDEIVGQAFIFLIAGYEIITNTLSFATYLLATNPDCQEKLLREVDVFKEKHMAPEFCSLEEGLPYLDMVIAETLRMYPPAFRFTREAAQDCEVLGQRIPAGAVLEMAVGALHHDPEHWPSPETFNPERYRCS

SEQ ID NO: 100901 - protein, 110 aa, Homo sapiens
  MOD_RES (1)..(1): Any amino acid
XQFYLFENVDNAQQFKQLYRARMNALDLNMKTKERIVEEANKAFEYNMQIFNELDQAGSTLARETLEDGFPVHDGKGDMRKCPFYAAEQDKGRSVCPELPSWGRCSRRLH

SEQ ID NO: 100902 - protein, 79 aa, Homo sapiens
MESIFHEKQEGSLCAQHCLNNLLQGEYFSPVELSSIAHQLDEEERMRMAEGGVTSEDYRTFLQQPSGNMDDSGFFSIQK

SEQ ID NO: 100903 - protein, 203 aa, Homo sapiens
MLGITSCSDQQAKEGEGLEGSSTGSSSGNHGGSGGGNGHKPGCEKPGNEARGSGESGIQNSETSPGMFNFDTFWKNFKSKLGFINWDAINKNQVPPPSTRALLYFSRLWEDFKQNTPFLNWKAIIEGADASSLQKRAGRDDQPGAGWQEVAAVTSKNYNYNQHAYPTAYGGKYSVKTPAKGGVSPSSSASRVQPGLLQWVKFW

SEQ ID NO: 100904 - protein, 838 aa, Homo sapiens
MQKRQGYCSYCRVQYNNLEQHLFSAQHRSLTRQSRRQICTSSLMERFLQDVLQHHPYHCQESSSTQDETHVNTGSSSEVVHLDDAFSEEEEEDEDKVEDEDATEERPSEVSEPIEELHSRPHKSQEGTQEVSVRPSVIQKLEKGQQQPLEFVHKIGASVRKCNLVDIGQATNNRSNLVRPPVICNAPASCLPESSNDRPVTANTTSLPPAAHLDSVSKCDPNKVEKYLEQPDGASRNPVPSSHVETTSFSYQKHKESNRKSLRMNSDKLVLWKDVKSQGKTLSAGLKFHERMGTKGSLRVKSPSKLAVNPNKTDMPSNKGIFEDTIAKNHEEFFSNMDCTQEEKHLVFNKTAFWEQKCSVSSEMKFDCISLQSASDQPQETAQDLSLWKEEQIDQEDNYESRGSEMSFDCSSSFHSLTDQSKVSAKEVNLSKEVRTDVQYKNNKSYVSKISSDCDDILHLVTNQSQMIVKEISLQNARHISLVDQSYESSSSETNFDCDASPQSTSDYPQQSVTEVNLPKEVHIGLVDKNYGSSSSEVSADSVFPLQSVVDRPPVAVTETKLRKKAHTSLVDNYGSSCSETSFDCDVSLESVVDHPQLTVKGRNLKGRQVHLKHKKRKPSSAKAHLDCDVSLGTVADESQRAVEKINLLKEKNADLMDMNCESHGPEMGFQADAQLADQSQVAEIERQKVDVDLENKSVQSSRSSLSSDSPASLYHSAHDEPQEALDEVNLKELNIDMEVRSYDCSSSELTFDSDPPLLSVTEQSHLDAEGKERHIDLEDESCESDSSEITFDSDIPLYSVIDQPEVAVYEEETVDLESKSNESCVSEITFDSDIPLH

SEQ ID NO: 100905 - protein, 188 aa, Homo sapiens
MFPPSGSTGLIPPSHFQARPLSTLPRMAPTWLSDIPLVQPPGHQDVSERRLDTQRPQVTMWERDVSSDRQEPGRRGRSWGLEGSQALSQQAEVIVRQLQELRRLEEEVRLLRETSLQQKMRLEAQAMELEALARAEKAGRAEAEGLRAALAGAEVVRKNLEEGRQRELEEVQRLHQEQLSSLTQAHEE

SEQ ID NO: 100906 - protein, 48 aa, Homo sapiens
MDSSSSSSAAGLGAVDPQLQHFIEVETQKQRFQQLVHQMTELCWVPVA

SEQ ID NO: 100907 - protein, 95 aa, Homo sapiens
MVRLDISEGRAAVAAVVGGVVAVGTVLVALSAMGFTSVGIAASSIAAKMMSTAAIANGGGVAAGSLVAILQSVGAAGLSVTSKVIGGFAGTALGA

SEQ ID NO: 100908 - protein, 598 aa, Homo sapiens
MLETYNHLVSLEIPSSKPKLIAQLERGEAPWREERKCPLDLCPESKPEIQLSPSCPLIFSSQQALSQHVWLSHLSQLFSSLWAGNPLHLGKHYPEDQKQQQDPFCFSGKAEWIQEGEDSRLLFGRVSKNGTSKALSSPPEEQQPAQSKEDNTVVDIGSSPERRADLEETDKVLHGLEVSGFGEIKYEEFGPGFIKESNLLSLQKTQTGETPYMYTEWGDSFGSMSVLIKNPRTHSGGKPYVCRECGRGFTWKSNLITHQRTHSGEKPYVCKDCGRGFTWKSNLFTHQRTHSGLKPYVCKECGQSFSLKSNLITHQRAHTGEKPYVCRECGRGFRQHSHLVRHKRTHSGEKPYICRECEQGFSQKSHLIRHLRTHTGEKPYVCTECGRHFSWKSNLKTHQRTHSGVKPYVCLECGQCFSLKSNLNKHQRSHTGEKPFVCTECGRGFTRKSTLSTHQRTHSGEKPFVCAECGRGFNDKSTLISHQRTHSGEKPFMCRECGRRFRQKPNLFRHKRAHSGAFVCRECGQGFCAKLTLIKHQRAHAGGKPHVCRECGQGFSRQSHLIRHQRTHSGEKPYICRKCGRGFSRKSNLIRHQRTHSG

SEQ ID NO: 100909 - protein, 237 aa, Homo sapiens
MGGIASMPPLTAVAPVPMGSIPVVGMSPTLVSSVPTAAVPPLANGAPPVIQPLPAFAHPAATLPKSSSFSRSGPGSQLNTKLQKAQSFDVASVPPVAEWAVPQSSRLKYRQLFNSHDKTMSGHLTGPQARTILMQSSLPQAQLASIWNLSDIDQDGKLTAEEFILAMHLIDVAMSGQPLPPVLPPEYIPPSFRRVRSGSGISVISSTSVDQRLPEEPVLEDEQQQLEKKLPVAVFLV

SEQ ID NO: 100910 - protein, 800 aa, Homo sapiens
MAFSGIYKLDDGKPYLNNCFPARNLLRVPEEGQGHWLVVQKGNLKKKPKGLVGAQAERRESLKATSFEFKGKKESRRENQVDLPGHILDQAFLLKHHCVRKPSDLCTINVSGLKFSKAKENDFKHFHSVIYINASENLLPLEAFHTFPALKELDLAFNGIKTIYVKYGDFKLLEFLDLSFNSLTVEAICDLGILPHLRVLLLTGNGLTSLPPNLAVAEQEASVTSLTSKRYILRFPALETLMLDDNRLSNPSCFASLAGLRRLKKLSLDENRIIRIPYLQQVQLYDESVDWNGGRGSPHKEPQFMLQSKPRMLEDSDEQLDYTVLPMKKDVDRTEVVFSSYPGFSTSETTKICSLPPIFEILPVKSLKARNQTLAPPFPELRYLSLAYNKIAKEDAVLPVALFPSLCEFVFHNNPLVAHTRGVPPLLKSFLQERLGIHLIRRKIVKPKHHVLMSRKESWKVKSEIPKVPKQPLVLHHPRMTTTKSPSKDMLEPEAELAEDLPTTKSTSVESEMPTENLEGHSPSCRTFVPLPPICSNSTVHSEETLSHLSDTTVRLSPERPSDEDSKSTESIFLTQVSELPSSVIHKDDLELKEKDQKKPPTAPREVKGTRRKLPTAFLPSKYHGYEELLTAKPDPAFIEPKGIQKNAQALQQMLKHPLLCHSSKPKLDTLQKPYVHKEKRAQRIPIPPPKKTRAQLLDDIFIRLRDPRNITEAPLGAVLHQWTERRLVNHKQYLEAKRLLKEFQARYRQLVSGSLRTVFGTTPLPMACPALSESQPKFGHFLEFMDEFCQEPTASDSQG

SEQ ID NO: 100911 - protein, 69 aa, Homo sapiens
MTTLIPILSTFLFEDFSKASGFKGQRPETLHERLTLVSVYAPYLLIPFILLIFMLRSPYYKYEEKRKKK

SEQ ID NO: 100912 - protein, 136 aa, Homo sapiens
MGGGRRPYDVFFSKVMAENDVDNELLDYEDDEVETAAGGDGAEAPAKKDVKGSYVSIHSSGFRDFLLKPELLRAIVDCGFEHPSEVQHECIPQAILGMDVLCQAKSGMGKTAVFVLATLQQLEPVTGQVSVLVMCH

SEQ ID NO: 100913 - protein, 2352 aa, Homo sapiens
MIPDGSSEIQEVMKNSGKHLFSAQHRSLTRQSRRQICTSSLMERFLQDVLQHHPYHCQESSSTQDETHVNTGSSSEVVHLDDAFSEEEEEDEDKVEDEDATEERPSEVSEPIEELHSRPHKSQEGTQEVSVRPSVIQKLEKGQQQPLEFVHKIGASVRKCNLVDIGQATNNRSNLVRPPVICNAPASCLPESSNDRPVTANTTSLPPAAHLDSVSKCDPNKVEKYLEQPDGASRNPVPSSHVETTSFSYQKHKESNRKSLRMNSDKLVLWKDVKSQGKTLSAGLKFHERMGTKGSLRVKSPSKLAVNPNKTDMPSNKGIFEDTIAKNHEEFFSNMDCTQEEKHLVFNKTAFWEQKCSVSSEMKFDCISLQSASDQPQETAQDLSLWKEEQIDQEDNYESRGSEMSFDCSSSFHSLTDQSKVSAKEVNLSKEVRTDVQYKNNKSYVSKISSDCDDILHLVTNQSQMIVKEISLQNARHISLVDQSYESSSSETNFDCDASPQSTSDYPQQSVTEVNLPKEVHIGLVDKNYGSSSSEVSADSVFPLQSVVDRPPVAVTETKLRKKAHTSLVDNYGSSCSETSFDCDVSLESVVDHPQLTVKGRNLKGRQVHLKHKKRKPSSAKAHLDCDVSLGTVADESQRAVEKINLLKEKNADLMDMNCESHGPEMGFQADAQLADQSQVAEIERQKVDVDLENKSVQSSRSSLSSDSPASLYHSAHDEPQEALDEVNLKELNIDMEVRSYDCSSSELTFDSDPPLLSVTEQSHLDAEGKERHIDLEDESCESDSSEITFDSDIPLYSVIDQPEVAVYEEETVDLESKSNESCVSEITFDSDIPLHSGNDHPEVAVKEVIQKEEYIHLERKNDEPSGSEISSDSHAPLHSVTNSPEVAVKKLNPQKEEQVHLENKENEPIDSEVSLDYNIIFHSVTGRSEDPIKEISLHTKEHMYLENKSVFETSLDSDVPLQAATHKPEVIVKETWLQREKHAEFQGRSTEFSGSKTSLDSGVPHYSVTEPQVAVNKINRKKQYVLENKNDKCSGSEIILDSNVPPQSMTDQPQLAFLKEKHVNLKDKNSKSGDSKITFDSEQLQEAVKKIDQWKEEVIGLKNKINEPSTYKLIHHPDVSVQSVADQPKVAIKHVNLGNENHMYLEVKNSQYSCSEMNLDSGFLGQSIVNRPQITILEQEHIELEGKHNQCCGSEVSFDSDDPLQSVADRLRETVKEISLWKDEEVDTEDRRNEAKGFEIMYDSDVLQPVAGQPEEVVKEVSLWKEHVDLENKIVKPTDSRINFDSHEPLQSVTNKIPGANKEINLLREEHVCLDDKGYVPSDSEIIYVSNIPLQSVIKQPHILEEEHASLEDKSSNSYSPEESSDSNDSFQAAADELQKPVKEINLWKEDHIYLEDKSYKLGDFDVSYASHIPVQFVTDQSSVPVKEINLQKKDHNDLENKNCEVCGSEIKCHSCVHLQSEVDQPQVSYKEADLQKEEHVVMEEKTDQPSDSEMMYDSDVPFQIVVNQFPGSVKETHLPKVVLVDLVPGDSDYEVISDDIPLQLVTDPPQLTVKDISCINTECIDIEDKSCDFFGSEVRCNCKASTPSMTNQCKETFKIINRKKDYIILGEPSCQSCGSEMNFNVDASDQSMTYESQGPDEKMVKYIDSEDKSCGYNGSKGKFNLEDTSHRTTHRLQKAHKEASLRKDPRNAGLKGKSCQSSASAVDFGASSKSALHRRADKKKRSKLKHRDLEVSCEPDGFEMNFQCAPPLPSDTDQPQETVKKRHPCKKVSSDLKEKNHDSQSSSVLKVDSVRNLKKAKDVIEDNPDEPVLEALPHVPPSFVGKTWSQIMREDDIKINALVKEFREGRFHCYFDDDCETKKVSSKGKKKVTWADLQGKEDTAPTQAVSESDDIVCGISDIDDLSVALDKPCHRHPPAERPPKQKGRVASQCQTAKISHSTQTSCKNYPVMKRKIIRQEEDPPKSKCSRLQDDRKTKKKVKIGTVEFPASCTKVLKPMQPKALVCVLSSLNIKLKEGEGLPFPKMRHHSWDNDIRFICKYKRNIFDYYEPLIKQIVISPPLSVIVPEFERRNWVKIHFNRSNQNSSAGDNDADGQGSASAPLMAVPARYGFNSHQGTSDSSLFLEESKVLHARELPKKRNFQLTFLNHDVVKISPKSVRNKLLESQSKKKIHGKRVTTSSNKLGFPKKVYKPIILQQKPRKASEKQSIWIRTKPSDIIRKYISKYSVFLRHRYQSRSAFLGRYLKKKKSVVSRLKKAKRTAKVLLNSSVPPAGAEELSSAMANPPPKRPVRASCRVARRRKKTDESYHGRQKGPSTPVRAYDLRSSSCLQQRERMMTRLANKLRGNEVK

SEQ ID NO: 100914 - protein, 427 aa, Homo sapiens
MSLHGASGGHERSRDRRRSSDRSRDSSHERTESQLTPCIRNVTSPTRQHHVEREKDHSSSRPSSPRPQKASPNGSISSAGNSSRNSSQSSSDGSCKTAGEMVFVYENAKEGARNIRTSERVTLIVDNTRFVVDPSIFTAQPNTMLGRMFGSGREHNFTRPNEKGEYEVAEGIGSTVFRAILDYYKTGIIRCPDGISIPELREACDYLCISFEYSTIKCRDLSALMHELSNDGARRQFEFYLEEMILPLMVASAQSGERECHIVVLTDDDVVDWDEEYPPQMGEEYSQIIYSTKLYRFFKYIENRDVAKSVLKERGLKKIRLGIEGYPTYKEKVKKRPGGRPEVIYNYVQRPFIRMSWEKEEGKSRHVDFQCVKSKSITNLAAAAADIPQDQLVVMHPTPQVDELDILPIHPPSGNSDLDPDAQNPML

SEQ ID NO: 100915 - protein, 601 aa, Homo sapiens
MSVMLAKPRLDTEQLAQRGAGLCFTFVSAQQNSPSSTGSGNTEHSCSSQKQISIQHRQTQSDLTIEKISALENSKNSDLEKKEGRIDDLLRANCDLRRQIDEQQKMLEKYKERLNRCVTMSKKLLIEKSKQEKMACRDKSMQDRLRLGHFTTVRHGASFTEQWTDGYAFQNLIKQQERINSQREEIERQRKMLAKRKPPAMGQAPPATNEQKQRKSKTNGAENETLTLAEYHEQEEIFKLRLGHLKKEEAEIQAELERLERVRNLHIRELKRIHNEDNSQFKDHPTLNDRYLLLHLLGRGGFSEVYKAFDLTEQRYVAVKIHQLNKNWRDEKKENYHKHACREYRIHKELDHPRIVKLYDYFSLDTDSFCTVLEYCEGNDLDFYLKQHKLMSEKEARSIIMQIVNALKYLNEIKPPIIHYDLKPGNILLVNGTACGEIKITDFGLSKIMDDDSYNSVDGMELTSQGAGTYWYLPPECFVVGKEPPKISNKVDVWSVGVIFYQCLYGRKPFGHNQSQQDILQENTILKATEVQFPPKPVVTPEAKAFIRRCLAYRKEDRIDVQQLACDPYLLPHIRKSVSTSSPAGAAIASTSGASNNSSSN

SEQ ID NO: 100916 - protein, 77 aa, Homo sapiens
MGVPRTPSRTVLFERERTGLTYRVPSLLPVPPGPTLLAFVEQRLSPDDSHAHRLVLRRGTLAGGSVRWGALHVLGTA

SEQ ID NO: 100917 - protein, 177 aa, Homo sapiens
MSSGLRAADFPRWKRHISEQLRRRDRLQRQAFEEIILQYNKLLEKSDLHSVLAQKLQAEKHDVPNRHEIRRRQARLQKELAEAAKEPLPVEQDDDIEVIVDETSDHTEETSPVRAISRAATKRLSQPAGGLLDSITNIFGLSESPLLGHHSSSDAARRRSVSSFPVPQDNVDTHPGS

SEQ ID NO: 100918 - protein, 91 aa, Homo sapiens
MMDASKELQVLHIDFLNQDNAVSHHTWEFQTSSPVFRRGQVFHLRLVLNQPLQSYHQLKLEFSTGHSGCHQFPQCHPGQVPTKRENWKPHP

SEQ ID NO: 100919 - protein, 19 aa, Homo sapiens
SYNTDKLIFGTGTRLQVFP

SEQ ID NO: 100920 - protein, 348 aa, Homo sapiens
MIPFPHPQVTDALGRYSNYILSSTVESPSLRSMNFEKQGERVLCFHGPLLYEAKCVKVAIKDKQVKYFIHYSGWNKNWDEWVPESRVLKYVDTNLQKQRELQKANQEQYAEGKMRGAAPGKKTSGLQQKNVEVKTKKNKQKTPGNGDGGSTSETPQPPRKKRARVDPTVENEETFMNRVEVKVKIPEELKPWLVDDWDLITRQKQLFYLPAKKNVDSILEDYANYKKSRGNTDNKEYAVNEVVAGIKEYFNVMLGTQLLYKFERPQYAEILADHPDAPMSQVYGAPHLLRLFVRIGAMLAYTPLDEKSLALLLNYLHDFLKYLAKNSATLFSASDYEVAPPEYHRKAV

SEQ ID NO: 100921 - protein, 194 aa, Homo sapiens
MQRARPLQALLDGRGLCVNASAVSRLRAYLLPAPPAPGNASESEEDRSAGSVESPSVSSTHRVSDPKFHPLHSKIIIIKKGHAKDSQRYKVDYESQSTDTQNFSSESKRETEYGPCRREMEDTLNHLKFLNVLSPRGVHIPNCDKKGFYKKKQCRPSKGRKRGFCWCVDKYGQPLPGYTTKGKEDVHCYSMQSK

SEQ ID NO: 100922 - protein, 88 aa, Homo sapiens
MELKQSLSTHLEAEKPLRRYGAVEETAWKTERLGRNQLDIISMAETTMMPEEIELEMAKIQRLREVLVRRESELRFMLCNLAQISYLL

SEQ ID NO: 100923 - protein, 141 aa, Homo sapiens
  MOD_RES (1)..(1): Any amino acid
XKDYAFVHFEDRGAAVKAMDEMNGKEIEGEEIEIVLAKPPDKKRKERQAARQASRSTAYEDYYYHPPPRMPPPIRGRGRGGGRGGYGYPPDYYGYEDYYDDYYGYDYHDYRGGYEDPYYGYDDGYAVRGRGGGRGGRGKRG

SEQ ID NO: 100924 - protein, 168 aa, Homo sapiens
MAREYREKIETELRDICNDVLSLLEKFLIPNASQAESKVFYLKMKGDYYRYLAEVAAGDDKKGIVDQSQQAYQEAFEISKKEMQPTHPIRLGLALNFSVFYYEILNSPEKACSLAKTAFDEAIAELDTLSEESYKDSTLIMQLLRDNLTLWTSDTQGDEAEAGEGGEN

SEQ ID NO: 100925 - protein, 39 aa, Homo sapiens
MSNLAQFDSDFYQSNFTIDNQEQSGNDSNAYGNLYGSRK

SEQ ID NO: 100926 - protein, 186 aa, Homo sapiens
MNLPHLMSLASHLASHGFFCLRFTCKGLNIVHRIKAYKSVLNYLKTSGEYKLAGVFLGGRSMGSRAAASVMCHIEPDDGDDFVRGLICISYPLHHPKQQHKLRDEDLFRLKEPVLFVSGSADEMCEKNLLEKVAQKMQAPHKIHWIEKANHSMAVKGRSTNDVFKEINTQILFWIQEITEMDKKCH

SEQ ID NO: 100927 - protein, 48 aa, Homo sapiens
MAETSLLEAGASAASTAAALENLQVEASCSVCLEYLKEPVIIECGHNF

SEQ ID NO: 100928 - protein, 677 aa, Homo sapiens
MAAFSEMGVMPEIAQAVEEMDWLLPTDIQAESIPLILGGGDVLMAAETGSGKTGAFSIPVIQIVYETLKDQQEGKKGKTTIKTGASVLNKWQMNPYDRGSAFAIGSDGLCCQSREVKEWHGCRATKGLMKGKHYYEVSCHDQGLCRVGWSTMQASLDLGTDKFGFGFGGTGKKSHNKQFDNYGEEFTMHDTIGCYLDIDKGHVKFSKNGKDLGLAFEIPPHMKNQALFPACVLKNAELKFNFGEEEFKFPPKDGFVALSKAPDGYIVKSQHSGNAQVTQTKFLPNAPKALIVEPSRELAEQTLNNIKQFKKYIDNPKLRELLIIGGVAARDQLSVLENGVDIVVGTPGRLDDLVSTGKLNLSQVRFLVLDEADGLLSQGYSDFINRMHNQIPQVTSDGKRLQVIVCSATLHSFDVKKLSEKIMHFPTWVDLKGEDSVPDTVHHVVVPVNPKTDRLWERLGKSHIRTDDVHAKDNTRPGANSPEMWSEAIKILKGEYAVRAIKEHKMDQAIIFCRTKIDCDNLEQYFIQQGGGPDKKGHQFSCVCLHGDRKPHERKQNLERFKVWYHVCSSRGKGCYNTRLKEDGGCTIWYNEMQLLSEIEEHLNCTISQVEPDIKVPVDEFDGKVTYGQKRAAGGGSYKGHVDILAPTVQELAALEKEAQTSFLHLGYLPNQLFRTF

SEQ ID NO: 100929 - protein, 358 aa, Homo sapiens
MENWPTPSELVNTGFQSVLSQGNKKPQNRKEKEEKVEKRSNSDSKENRETKLNGPGENVSEDEAQSSNQRKRANKHKWVPLHLDVVRSESQERPGSRNSSRCQPEANKPTHNNRRNDTRSWKRDREKRDDQDDVSSVRSEGGNIRGSFRGRGRGRGRGRGRGRGNPRLNFDYSYGYQEHGERTDQPFQTELNTSMMYYYDDGTGVQVYPVEEALLKEYIKRQIEYYFSVENLERDFFLRGKMDEQGFLPISLIAGFQRVQALTTNLNLILEALKDSTEVEIVDEKMRKKIEPEKWPIPGPPPRSVPPTDFSQLIDCPEFVPGQAFCSHTGNIFSSRANDVTVGYLVQFTYLFIYFQFI

SEQ ID NO: 100930 - protein, 165 aa, Homo sapiens
MAFSDLTSRTVHLYDNWIKDADPRVEDWLLMSSPLPQTILLGFYVYFVTSLGPKLMENRKPFELKKAMITYNFFIVLFSVYMCYEFVMSGWGIGYSFRCDIVDYSRSPTALRMARTCWLYYFSKFIELLDTIFFVLRKKNSQVTFLHVFHHTIMPWTWWFGVKFA

SEQ ID NO: 100931 - protein, 20 aa, Homo sapiens
MAEERVATLQSFLFWRSRTG

SEQ ID NO: 100932 - protein, 72 aa, Homo sapiens
MSQPRTPEQALDTPGDCPPGRRDEDAGEGIQCSQRMLSFSDALLSIIATVMILPVTHTEISPEQWTKAAPWK

SEQ ID NO: 100933 - protein, 159 aa, Homo sapiens
MTLHATRGAALLSWVNSLHVADPVEAVLQLQDCSIFIKIIDRIHGTEEGQQILKQPVSERLDFVCSFLQKNRKHPSSPECLVSAQKVLEGSELELAKMTMLLLYHSTMSSKSPRDWEQFEYKIQAELAVILKFVLDHEDGLNLNEDLENFLQKAPVPST

SEQ ID NO: 100934 - protein, 71 aa, Homo sapiens
MLFKLLQRQTYTCLSHRYGLYVCFLGVVVTIVSAFQFGEVVLEWSRDQYHVLFDSYRDNIAGKSFQNRSVR

SEQ ID NO: 100935 - protein, 125 aa, Homo sapiens
  MOD_RES (1)..(1): Any amino acid
XPDVVRARKRVCWEPWVIGLVIFISLIVLAVCIGLTVHYVRYNQKKTYNYYSTLSFTTDKLYAEFGREASNNFTEMSQRLESMVKNAFYKSPLREEFVKSQVIKFRNQQDRNRQLSKPLLRNTKK

SEQ ID NO: 100936 - protein, 1023 aa, Homo sapiens
MAVVNEDTQGNVSQLQAEVKRLKEQLAELASGQTPPESFLTRDKKKTNYMEYFQEAMLFFKKSEQEKKSLIEKVTQLEDLTLKKEKFIQSNKMIVKFREDQIIRLEKLHKESRGGFLPEEQDRLLSELRNEIQTLREQIEHHPRVAKYAMENHSLREENRRLRLLEPVKRAQEMDAQTIAKLEKAFSEISGMEKSDKNQQGFSPKAQKEPCLFANTEKLKAQLLQIQTELNNSKQEYEEFKELTRKRQLELESELQSLQKANLNLENLLEATKACKRQEVSQLNKIHAETLKIITTPTKAYQLHSRPVPKLSPEMGSFGSLYTQNSSILDNDILNEPVPPEMNEQAFEAISEELRTVQEQMSALQAKLDEEEHKNLKLQQHVDKLEHHSTQMQELFSSERIDWTKQQEELLSQLNVLEKQLQETQTKNDFLKSEVHDLRVVLHSADKELSSVKLEYSSFKTNQEKEFNKLSERHMHVQLQLDNLRLENEKLLESKACLQDSYDNLQEIMKFEIDQLSRNLQNFKKENETLKSDLNNLMELLEAEKERNNKLSLQFEEDKENSSKEILKVLEAVRQEKQKETAKCEQQMAKVQKLEESLLATEKVISSLEKSRDSDKKVVADLMNQIQELRTSVCEKTETIDTLKQELKDINCKYNSALVDREESRVLIKKQEVDILDLKETLRLRILSEDIERDMLCEDLAHATEQLNMLTEASKKHSGLLQSAQEELTKKEALIQELQHKLNQKKEEVEQKKNEYNFKMRQLEHVMDSAAEDPQSPKTPPHFQTHLAKLLETQEQEIEDGRASKTSLEHLVTKLNEDREVKNAEILRMKEQLREMENLRLESQQLIEKNWLLQGQLDDIKRQKENSDQNHPDNQQLKNEQEESIKERLAKSKIVEEMLKMKADLEEVQSALYNKEMECLRMTDEVERTQTLESKAFQEKEQLRSKLEEMYEERERTSQEMEMLRKQVECLAEENGKLVGHQNLHQKIQYVVRLKKENVRLAEETEKLRAENVFLKEKKRSES

SEQ ID NO: 100937 - protein, 148 aa, Homo sapiens
LRSRQGPTRLPRLECSGAITAHCSLDLPGPDKHDELEAPSMKTDTRTIFVAIFSCISILLLFLSVFIIYRCSQHSSSSEESTKRTSHSKLPEQEAAEADLSNMERVSLSTADPQGVTYAELSTSALSEAASDTTQEPPGSHEYAALKV

SEQ ID NO: 100938 - protein, 176 aa, Homo sapiens
  MOD_RES (1)..(1): Any amino acid
XTATDSDTESRGLREYHSVGVQVEDEKRHGRFKRSNSVTAAVQADLELEGFPGHITTEDKGLQFGSSFQRHSEPSTPTQYSAVRTVRTQGLFSYREDYRTQVDTSTLPPPDPWLEPAIDTVETGRMSPCRRDGSWFLKLLHAETKRMEGWCKEMEREAEENDLSEESKSSGFPRAS

SEQ ID NO: 100939 - protein, 417 aa, Homo sapiens
MLRFYLFISLLCLSRSDAEETCPSFTRLSFHSAVVGTGLNVRLMLYTRKNLTCAQTINSSAFGNLNVTKKTTFIVHGFRPTGSPPVWMDDLVKGLLSVEDMNVVVVDWNRGATTLIYTHASSKTRKVAMVLKEFIDQMLAEGASLDDIYMIGVSLGAHISGFVGEMYDGWLGRITALGYKEPLGNIDFYPNGGLDQPGCPKTILGGFQYFKCDHQRSVYLYLSSLRESCTITAYPCDSYQDYRNGKCVSCGTSQKESCPLLGYYADNWKDHLRGKDPPMTKAFFDTAEESPFCMYHYFVDIITWNKNVRRGDITIKLRDKAGNTTESKINHEPTTFQKYHQVSLLARFNQDLDKVAAISLMFSTGSLIGPRYKLRILRMKLRSLAHPERPQLCRYDLVLMENVETVFQPILCPELQL

SEQ ID NO: 100940 - protein, 425 aa, Homo sapiens
MFYFRGCGRWVAVSFTKQQFPLARLSSDSAAPRTPHFDVIVIGGGHAGTEAATAAARCGSRTLLLTHRVDTIGQMSCNPSFGGIGKGHLMREVDALDGLCSRICDQSGVHYKVLNRRKGPAVWGLRAQIDRKLYKQNMQKEILNTPLLTVQEGAVEDLILTEPEPEHTGKCRVSGVVLVDGSTVYAESVILTTGTFLRGMIVIGLETHPAGRLGDQPSIGLAQTLEKLGFVVGRLKTGTPPRIAKESINFSILNKHIPDNPSIPFSFTNETVWIKPEDQLPCYLTHTNPRVDEIVLKNLHLNSHVKETTRGPRYCPSIESKVLRFPNRLHQVWLEPEGMDSDLIYPQGLSMTLPAELQEKMITCIRGLEKAKVIQPGYGVQYDYLDPRQITPSLETHLVQRLFFAGQINGTTGYEEAAAQCSCRV

SEQ ID NO: 100941 - protein, 456 aa, Homo sapiens
MGWDLGTRLFQRQEQRSRLSRIWLEKTRVFLEGSTRTPALPHCLFWLLQVPSTQDPLFPGYGPQCPVDLAGPPCLRPLFGGLGGYWRALQRGREGRTMTSRASELSPGRSVTAGIIIVGDEILKGHTQDTNTFFLCRTLRSLGVQVCRVSVVPDEVATIAAEVTSFSNRFTHVLTAGGIGPTHDDVTFEAVAQAFGDELKPHPKLEAATKALGGEGWEKLSLVPSSARLHYGTDPCTGQPFRFPLVSVRNVYLFPGIPELLRRVLEGMKGLFQNPAVQFHSKELYVAADEASIAPILAEAQAHFGRRLGLGSYPDWGSNYYQVKLTLDSEEEGPLEECLAYLTARLPQGSLVPYMPNAVEQASEAVYKLAESGSSLGKKVAGALQTIETSLAQYSLTQLCVGFNGGKDCTALLHLFHAAVQRKLPDVPNPLQILYIRSISPFPELEQFLQDTIKRY

SEQ ID NO: 100942 - protein, 90 aa, Homo sapiens
MPTDHEEPCGPSHKSFCLNGGLCYVIPTIPSPFCRCVENYTGARCEEVFLPGSSIQTKSNLFEAFVALAVLVTLIIGAFYFLCRCGNTCM

SEQ ID NO: 100943 - protein, 626 aa, Homo sapiens
MSWKSSLPTFFCHIYSFFHDFLYWLCGKSVKSCTTSGNSFFKQEFIILGMMAFMDFSVTMMALSLEEEAGRIKDCWDNQEAPALSTCSNANIFRRINAILDNSLDFSRVCTTPINRGIHDHLPDFQDSEETVTSRMLFPTSAQESSRGLPDANDLCLGLQSLSLTGWDRPWSTQDSDSSAQSSTHSVLSMLHNPLGNVLGKPPLSFLPLDPLGSDLVDKFPAPSVRGSRLDTRPILDSRSSSPSDSDTSGFSSGSDHLSDLISSLRISPPLPFLSLSGGGPRDPLKMGVGSRMDQEQAALAAVTPSPTSASKRWPGASVWPSWDLLEAPKDPFSIEREARLHRQAAAVNEATCTWSGQLPPRNYKNPIYSCKVFLGGVPWDITEAGLVNTFRVFGSLSVEWPGKDGKHPRCPPKGNMPKGYVYLVFELEKSVRSLLQACSHDPLSPDGLSEYYFKMSSRRMRCKEVQVIPWVLADSNFVRSPSQRLDPSRTVFVGALHGMLNAEALAAILNDLFGGVVYAGIDTDKHKYPIGSGRVTFNNQRSYLKAVSAAFVEIKTTKFTKKVQIDPYLEDSLCHICSSQPGPFFCRDQVCFKYFCRSCWHWRHSMEGLRHHSPLMRNQKNRDSS

SEQ ID NO: 100944 - protein, 580 aa, Homo sapiens
MSLVPATNYIYTPLNQLKGGTIVNVYGVVKFFKPPYLSKGTDYCSVVTIVDQTNVKLTCLLFSGNYEALPIIYKNGDIVRFHRLKIQVYKKETQGITSSGFASLTFEGTLGAPIIPRTSSKYFNFTTEDHKMVEALRVWASTHMSPSWTLLKLCDVQPMQYFDLTCQLLGKAEVDGASFLLKVWDGTRTPFPSWRVLIQDLVLEGDLSHIHRLQNLTIDILVYDNHVHVARSLKVGSFLRIYSLHTKLQSMNSENQTMLSLEFHLHGGTSYGRGIRVLPESNSDVDQLKKDLESANLTANQHSDVICQSEPDDSFPSSGSVSLYEVERCQQLSATILTDHQYLERTPLCAILKQKAPQQYRIRAKLRSYKPRRLFQSVKLHCPKCHLLQEVPHEGDLDIIFQDGATKTPDVKLQNTSLYDSKIWTTKNQKGRKVAVHFVKNNGILPLSNECLLLIEGGTLSEICKLSNKFNSVIPVRSGHEDLELLDLSAPFLIQGTIHHYGCKQCSSLRSIQNLNSLVDKTSWIPSSVAEALGIVPLQYVFVMTFTLDDGTGVLEAYLMDSVSIRGQILPDSSIRSSDG

SEQ ID NO: 100945 - protein, 46 aa, Homo sapiens
MKSSDIDQDLFTDSYCKVCSAQLISESQRVAHYECGAVPLGMSNVT

SEQ ID NO: 100946 - protein, 73 aa, Homo sapiens
MISSKPRLVVPYGLKTLLEGISRAVLKTNPSNINQFAAAYFQELTMYRGNTTMDIKDLVKQFHQIKDGATNVC

SEQ ID NO: 100947 - protein, 153 aa, Homo sapiens
MAAGTAVGAWVLVLSLWGAVVGAQNITARIGEPLVLKCKGAPKKPPQRLEWKLNTGRTEAWKVLSPQGGGPWDSVARVLPNSSLFLPAVGIQDEGILGGLGTAALLIGVILWQRRQRRGEERKAPENQEEEEERAELNQSEEPEAGESSTGGP

SEQ ID NO: 100948 - protein, 161 aa, Homo sapiens
MVRDSMAAAFRPSNRVLLQALQILVYPGVGGSGSVSCRCPLGAKRYLLTDNVVKLKEFQQKKVAVACNLSGTKETYFRNLKKKLTQNKLILKGELITLLHLCESRDHVELAKNVIYRYHAENKNFTLGEYKFGPLFVRLCYELDLEESAVELMKDQVLCKY

SEQ ID NO: 100949 - protein, 185 aa, Homo sapiens
MAYYQPSLTAEYDEDSPGGDFDFFSNLVTKWEAAARLPGDSTRQVVVRSGVVLGRGGGAMGHMLLPFRLGLGGPIGSGHQFFPWIHIGDLAGILTHALEANHVHGVLNGVAPSSATNAEFAQTLGAALGRRAFIPLPSAVVQAVFGRQRAIMLLEGQKVIPQRTLATGYQYSFPELGAALKEIVA

SEQ ID NO: 100950 - protein, 176 aa, Homo sapiens
MSTVHEILCKLSLEGDHSTPPSAYGSVKAYTNFDAERDALNIETAIKTKGVDEVTIVNILTNRSNAQRQDIAFAYQRRTKKELASALKSALSGHLETVILGLLKTPAQYDASELKASMKGLGTDEDSLIEIICSRTNQELQEINRVYKEMYKTDLEKDIISDTSGDFRKLMVALAK

SEQ ID NO: 100951 - protein, 710 aa, Homo sapiens
MLELQYHNEDLEKDKTSQNCLGRGMEQVAKKLGVAHEEIQRLTDELQVKEKEQCKLDSALKKAQLEIDKLKENLVKLKENDAADLQKAKEQNQRLDEEILALRNRVRSLDSEKKVLGEMVERLKGEVCESQENKQLGNHSPGKTVGGEQREQHPSSGEKLKYNQQGEVQQLHQNLHRLQILCNSAENELRYERGQNLDLKQHNSLLQEENIKIKIELKHAQQKLLDSTKMCSSLTAEYKHCQQKIKELELEVLKHTQSIKSQNNLQEKLVQEKSKVADAEEKILDLQRKLEHAHKVCLTDTCISEKQQLEEKIKEATQNEAKVKQQYQEEQQKRKLLYQNVDELHRQVRTLQDKENLLEMTCSQQQSRIQQQEALLKQLENEKRKYDEHVKSNQELSEKLSKLQQEKEALREEYLRLLKLLNVHVRNYNEKHHQQKVKLQKVKYRLTNEVELRDKRINQFEDEIGILQHKIEKEKAIQDQITAQNDTLLLEKRKLQEQVIEQEQLIHSNKWTISSIQSRVLYMDKENKQLQENSLRLTQQIGFLERIIRSIHIRRGENLKEFPVPKWWHRGKLASLPPTKKQKEIYSTEVFTSNNAELQHEDESVPEATEKWKHSEQMETTISDILESEVVNEILPLSNSSFSGKGLVESFASLQETEEIKSKEAMASSKSPEKSPENLVCSQNSEAGYINVASLKETHGIQEQDQKSEL

SEQ ID NO: 100952 - protein, 89 aa, Homo sapiens
MLATRLSRPLSRLPGKTLSACDRENGARRPLLLGSTSFIPIGRRTYASAAEPVGSKAVLVTGCDSGFGFSLAKHLHSKGFLVFAGCLMK

SEQ ID NO: 100953 - protein, 234 aa, Homo sapiens
MAAGTAVGAWVLVLSLWGAVVGAQNITARIGEPLVLKCKGAPKKPPQRLEWKLNTGRTEAWKVLSPQGGGPWDSVARVLPNGSLFLPAVGIQDEGIFRCQAMNRNGKETKSNYRSLRTFTITASDWIFPPSEIPGKPEIVDSASELTAGVPNKVGTCVSEGSYPAGTLSWHLDGKPLVPNEKGVSVKEQTRRHPETGLFTLQSELMVTPARGGDPRPTFSCSFSPGLPRHRALR

SEQ ID NO: 100954 - protein, 97 aa, Homo sapiens
MDVHDLFRRLGAGAKFDTRRFSADAARFQIGKRKYDFDSSEVLQGLDFFGNKKSVPGVCGASQTHQKPQNGEKKEESLTERKREQSKKKRKTMTSGE

SEQ ID NO: 100955 - protein, 767 aa, Homo sapiens
MGPEALSSLLLLLLVASGDADMKGHFDPAKCRYALGMQDRTIPDSDISASSSWSDSTAARHSRLESSDGDGAWCPAGSVFPKEEEYLQVDLQRLHLVALVGTQGRHAGGLGKEFSRSYRLRYSRDGRRWMGWKDRWGQEVISGNEDPEGVVLKDLGPPMVARLVRFYPRADRVMSVCLRVELYGCLWRDGLLSYTAPVGQTMYLSEAVYLNDSTYDGHTVGGLQYGGLGQLADGVVGLDDFRKSQELRVWPGYDYVGWSNHSFSSGYVEMEFEFDRLRAFQAMQVHCNNMHTLGARLPGGVECRFRRGPAMAWEGEPMRHNLGGNLGDPRARAVSVPLGGRVARFLQCRFLFAGPWLLFSEISFISDVVNNSSPALGGTFPPAPWWPPGPPPTNFSSLELEPRGQQPVAKAEGSPTAILIGCLVAIILLLLLIIALMLWRLHWRRLLSKVLESHPRTRSPGLVGIRPTPLPVSPMALVHLCEVDSPQDLVSLDFPLNVRKGHPLLVAVKILRPDATKNARNDFLKEVKIMSRLKDPNIIRLLGVCVQDDPLCMITDYMENGDLNQFLSAHQLEDKAAEGAPGDGQAAQGPTISYPMLLHVAAQIASGMRYLATLNFVHRDLATRNCLVGENFTIKIADFGMSRNLYAGDYYRVQGRAVLPIRWMAWECILMGKFTTASDVWAFGVTLWEVLMLCRAQPFGQLTDEQVIENAGEFFRDQGRQVYLSRPPACPQGLYELMLRCWSRESEQRPPFSQLHRFLAEDALNTV

SEQ ID NO: 100956 - protein, 1254 aa, Homo sapiens
MSQPPLLPASAETRKFTRALSKPGTAAELRQSVSEVVRGSVLLAKPKLIEPLDYENVIVQKKTQILNDCLREMLLFPYDDFQTAILRRQGRYICSTVPAKAEEEAQSLFVTECIKTYNSDWHLVNYKYEDYSGEFRQLPNKVVKLDKLPVHVYEVDEEVDKDEDAASLGSQKGGITKHGWLYKGNMNSAISVTMRSFKRRFFHLIQLGDGSYNLNFYKDEKISKEPKGSIFLDSCMGVVQNNKVRRFAFELKMQDKSSYLLAADSEVEMEEWITILNKILQLNFEAAMQEKRNGDSHEDDEQSKLEGSGSGLDSYLPELAKSAREAEIKLKSESRVKLFYLDPDAQKLDFSSAEPEVKSFEEKFGKRILVKCNDLSFNLQCCVAENEEGPTTNVEPFFVTLSLFDIKYNRKISADFHVDLNHFSVRQMLATTSPALMNGSGQSPSVLKGILHEAAMQYPKQGIFSVTCPHPDIFLVARIEKVLQGSITHCAEPYMKSSDSSKVAQKVLKNAKQACQRLGQYRMPFAWAARTLFKDASGNLDKNARFSAIYRQDSNKLSNDDMLKLLADFRKPEKMAKLPVILGNLDITIDNVSSDFPNYVNSSYIPTKQFETCSKTPITFEVEEFVPCIPKHTQPYTIYTNHLYVYPKYLKYDSQKSFAKARNIAICIEFKDSDEEDSQPLKCIYGRPGGPVFTRSAFAAVLHHHQNPEFYDEIKIELPTQLHEKHHLLLTFFHVSCDNSSKGSTKKRDVVETQVGYSWLPLLKDGRVVTSEQHIPVSANLPSGYLGYQELGMGRHYGPEIKWVDGGKPLLKISTHLVSTVYTQDQHLHNFFQYCQKTESGAQALGNELVKYLKSLHAMEGHVMIAFLPTILNQLFRVLTRATQEEVAVNVTRVIIHVVAQCHEEGLESHLRSYVKYAYKAEPYVASEYKTVHEELTKSMTTILKPSADFLTSNKLLKYSWFFFDVLIKSMAQHLIENSKVKLLRNQRFPASYHHAVETVVNMLMPHITQKFRDNPEASKNANHSLAVFIKRCFTFMDRGFVFKQINNYISCFAPGDPKTLFEYKFEFLRVVCNHEHYIPLNLPMPFGKGRIQRYQDLQLDYSLTDEFCRNHFLVGLLLREVGTALQEFREVRLIAISVLKNLLIKHSFDDRYASRSHQARIATLYLPLFGLLIENVQRINVRDVSPFPVNAGMTVKDESLALPAVNPLVTPQKGSTLDNSLHKDLLGAISGIGNAPCSCGLLSTITLKVSWSQ

SEQ ID NO: 100957 - protein, 85 aa, Homo sapiens
MYVPGKLHDVEHVLIDVGTGYYVEKTAEDAKDFFKRKIDFLTKQMEKIQPALQEKHAMKQAVMEMMSQKIQQLTALGAAQATAKA

SEQ ID NO: 100958 - protein, 102 aa, Homo sapiens
MQEKYPDAVYLSEGPSSCSMGIRSASRPGFELVIVWRIQIDEDGKVFPKLDLLTKVPQRALELDKNRAIETAPLSFRTLVGLLGIEAALESLIKSLCAEENN

SEQ ID NO: 100959 - protein, 75 aa, Homo sapiens
MAMQMQLEANADTSVEEESFGPQPISRLEQCGINANDVKKLEEAGFHTVEAVAYAPKKELINIKGISEAKADKIL

SEQ ID NO: 100960 - protein, 2138 aa, Homo sapiens
PGTTEDTLITGSKTAAPVTSTGSTTATLEGQSTAASSRTSNQDISASSQNHQTKSTETTSKAQTDTLTQMMTSTLFSSPSVHNVMETAPPDEMTTSFPSSVTNTLMMTSKTITMTTSTDSTLGNTEETSTAGTESSTPVTSAVSITAGQEGQSRTTSWRTSIQDTSASSQNHWTRSTQTTRESQTSTLTHRTTSTPSFSPSVHNVTGTVSQKTSPSGETATSSLCSVTNTSMMTSEKITVTTSTGSTLGNPGETSSVPVTGSLMPVTSAALVTFDPEGQSPATFSRTSTQDTTAFSKNHQTQSVETTRVSQINTLNTLTPVTTSTVLSSPSGFNPSGTVSQETFPSGETTTSSPSSVSNTFLVTSKVFRMPTSRDSTLGNTEETSLSVSGTISAITSKVSTIWWSDTLSTALSPSSLPPKISTAFHTQQSEGAETTGRPHERSSFSPGVSQEIFTLHETTTWPSSFSSKGHTTWSQTELPSTSTGAATRLVTGNPSTGTAGTIPRVPSKVSAIGEPGEPTTYSSHSTTLPKTTGAGAQTQWTQETGTTGEALLSSPSYSVTQMIKTATSPSSSPMLDRHTSQQITTAPSTNHSTIHSTSTSPQESPAVSQRGHTQAPQTTQESQTTRSVSPMTDTKTVTTPGSSFTASGHSPSEIVPQDAPTISAATTFAPAPTGDGHTTQAPTTALQAAPSSHDATLGPSGGTSLSKTGALTLANSVVSTPGGPEGQWTSASASTSPDTAAAMTHTHQAESTEASGQTQTSEPASSGSRTTSAGTATPSSSGASGTTPSGSEGISTSGETTRFSSNPSRDSHTTQSTTELLSASASHGAIPVSTGMASSIVPGTFHPTLSEASTAGRPTGQSSPTSPSASPQETAAISRMAQTQRTRTSRGSDTISLASQATDTFSTVPPTPPSITSTGLTSPQTETHTLSPSGSGKTFTTALISNATPLPVTYASSASTGHATPLAVSSATSASTVSSDSPLKMETPGMTTPSLKTDGGRRTATSPPPTTSQTIISTIPSTAMHTRSTAAPIPILPERGVSLFPYGAGAGDLEFVRRTVDFTSPLFKPATGFPLGSSLRDSLYFTDNGQIIFPESDYQIFSYPNPLPTGFTGRDPVALVAPFWDDADFSTGRGTTFYQEYETFYGEHSLLVQQAESWIRKMTNNGGYKARWALKVTWVNAHAYPAQWTLGSNTYQAILSTDGSRSYALFLYQSGGMQWDVAQRSGNPVLMGFSSGDGYFENSPLMSQPVWERYRPDRFLNSNSGLQGLQFYRLHREERPNYRLECLQWLKSQPRWPSWGWNQVSCPCSWQQGRRDLRFQPVSIGRWGLGSRQLCSFTSWRGGVCCSYGPWGEFREGWHVQRPWQLAQELEPQSWCCRWNDKPYLCALYQQRRPHVGCATYRPPQPAWMFGDPHITTLDGVSYTFNGLGDFLLVGAQDGNSSFLLQGRTAQTGSAQATNFIAFAAQYRSSSLGPVTVQWLLEPHDAIRVLLDNQTVTFQPDHEDGGGQETFNATGVLLSRNGSEVSASFDGWATVSVIALSNILHASASLPPEYQNRTEGLLGVWNNNPEDDFRMPNGSTIPPGSPEEMLFHFGMTWQINGTGLLGKRNDQLPSNFTPVFYSQLQKNSSWAEHLISNCDGDSSCIYDTLALRNASIGLHTREVSKNYEQANATLNQYPPSINGGRVIEAYKGQTTLIQYTSNAEDANFTLRDSCTDLELFENGTLLWTPKSLEPFTLEILARSAKIGLASALQPRTVVCHCNAESQCLYNQTSRVGNSSLEVAGCKCDGGTFGRYCEGSEDACEEPCFPSVHCVPGKGCEACPPNLTGDGRHCAALGSSFLCQNQSCPVNYCYNQGHCYISQTLGCQPMCTCPPAFTDSRCFLAGNNFSPTVNLELPLRVIQLLLSEEENASMAEVNASVAYRLGTLDMRAFLRNSQVERIDSAAPASGSPIQHWMVISEFQYRPRGPVIDFLNNQLLAAVVEAFLYHVPRRSEEPRNDVVFQPISGEDVRDVTALNVSTLKAYFRCDGYKGYDLVYSPQSGFTCVSPCSRGYCDHGGQCQHLPSGPRCSCVSFSIYTAWGEHCEHLSMKLDAFFGIFFGALGGLLLLGVGTFVVLRFWGCSGARFSYFLNSAEALP

SEQ ID NO: 100961 - protein, 30 aa, Homo sapiens
MPVKKKRKSPGVAAAVAEDGGLKKCKISRS

SEQ ID NO: 100962 - protein, 53 aa, Homo sapiens
MADRRRRLRPGTLAPVREGVNCRSSSYQRCWKCLILTGSWRTHGLIVRTPGKE

SEQ ID NO: 100963 - protein, 410 aa, Homo sapiens
MSLMVVSMACVGFFLLEGPWPHVGGQDKPFLSAWPGTVVSEGQHVTLQCRSRLGFKEFSLSKEDGMPVPELYNRIFRNSFLMGPVTPAHAGTYRCCSSHPHSPTGWSAPSNPVVIMVTGVHRKPSLLAHPGPLVKSGETVILQCWSDVSFERFLLHREGITEDPLRLVGQLHDAGSQVNYSMGPMTPALAGTYRCFGSVTHLPYELSAPSDPLDIVVVGLYGKPSLSAQPGPTVQAGENVTLSCSSRSLFDIYHLSREAEAGELRLTAVLRVNGTFQANFPLGPVTHGGTYRCFGSFRALPHAWSDPSDPLPVSVTGNSRNLHVLIGTSVVIIPFAILLFFLLHRWCANKKNAVVMDQEPAGNRTVNREDSDEQDPQEVTYAQLNHCVFTQRKITRPSQRPKTPPTDTSV

SEQ ID NO: 100964 - protein, 35 aa, Homo sapiens
MAGASVKVAVRVRPFNSREMSRDSKCIIQMSGSTT

SEQ ID NO: 100965 - protein, 371 aa, Homo sapiens
MEWNGLKMIISTMEPQVSNGPTSNTSNGPSSNNRNCPSPMQTGATTDDSKTNLIVNYLPQNMTQEEFRSLFGSIGEIESCKLVRDKITGQSLGYGFVNYIDPKDAEKAINTLNGLRLQTKTIKVSYARPSSASIRDANLYVSGLPKTMTQKELEQLFSQYGRIITSRILVDQVTGVSRGVGFIRFDKRIEAEEAIKGLNGQKPSGATEPITVKFANNPSQKSSQALLSQLYQSPNRRYPGPLHHQAQRFRLDNLLNMAYGVKRFSPITIDGMTSLVGMNIPGHTGTGWCIFVYNLSPDSDESVLWQLFGPFGAVNNVKVIRDFNTNKCKGFGFVTMTNYDEAAMAIASLNGYRLGDRVLQVSFKTNKAHKS

SEQ ID NO: 100966 - protein, 62 aa, Homo sapiens
MSTSWSDRLQNAADMPANMDKHALKKYRREAYHRVFVNRSLAMEKIKCFGFDMDYTLAGEPV

SEQ ID NO: 100967 - protein, 393 aa, Homo sapiens
MIFTFMTRKSCCSKQVQRKYWRNCQKLTATGSAPFPLALQRFSVVWDACSEALIMFDKDNLDDMGYIVENDVIMHALTKQLEAVSDRVTVLYRSKAIRYTWPCPFPMADSSPWVHITLGDGSTFQTKLLIGADGHNSGVRQAVGIQNVSWNYDQSAVVATLHLSEATENNVAWQRFLPSGPIALLPLSDTLSSLVWSTSHEHAAELVSMDEEKFVDAVNSAFWSDADHTDFIDTAGAMLQYAVSLLKPTKVSARQLPPSVARVDAKSRVLFPLGLGHAAEYVRPRVALIGDAAHRVHPLAGQGVNMGFGDISSLAHHLSTAAFNGKDLGSVSHLTGYETERQRHNTALLAATDLLKRLYSTSASPLVLLRTWGLQATNAVSPLKEQIMAFASK

SEQ ID NO: 100968 - protein, 401 aa, Homo sapiens
MLQNVTPHNKLPGEGNAGLLGLGPEAAAPGKRIRKPSLLYEGFESPTMASVPALQLTPANPPPPEVSNPKKPGRVTNQLQYLHKVVMKALWKHQFAWPFRQPVDAVKLGLPDYHKIIKQPMDMGTIKRRLENNYYWAASECMQDFNTMFTNCYIYNKPTDDIVLMAQTLEKIFLQKVASMPQEEQELVVTIPKNSHKKGAKLAALQGSVTSAHQVPAVSSVSHTALYTPPPEIPTTVLNIPHPSVISSPLLKSLHSAGPPLLAVTAAPPAQPLAKKKGVKRKADTTTPTPTAILAPGSPASPPGSLEPKAARLPPMRRESGRPIKPPRKDLPDSQQQHQSSKKGKLSEQLKHCNGILKELLSKKHAAYAWPFYKPVDASALGLHDYHDIIKHPMDLSTVKT

SEQ ID NO: 100969 - protein, 288 aa, Homo sapiens
MSLADLTKTNIDEHFFGVALENNRRSAACKRSPGTGDFSRNSNASNKSVDYSRSQCSCGSLSSQYDYSEDFLCDCSEKAINRNYLKQPVVKEKEKKKYNVSKISQSKGQKEISVEKKHTWNASLFNSQIHMIAQRRDAMAHRILSARLHKIKGLKNELADMHHKLEAILTENQFLKQLQLRHLKAIGKYENSQNNLPQIMAKHQNEVKNLRQLLRKSQEKERTLSRKLRETDSQLLKTKDILQALQKLSEDKNLAEREELTHKLSIITTKMDANDKKIQVCISGAQTV

SEQ ID NO: 100970 - protein, 219 aa, Homo sapiens
MGRLVAVGLLGIALALLGERLLALRNRLKASREVESVDLPHCHLIKGIEAGSEDIDILPNGLAFFSVGLKFPGLHSFAPDKPGGILMMDLKEEKPRARELRISRGFDLASFNPHGISTFIDNDDTVYLFVVNHPEFKNTVEIFKFEEAENSLLHLKTVKHELLPSVNDITAVGPAHFYATNDHYFSDPFLKYLETYLNLHWANVVYYSPNEVKVVYLCC

SEQ ID NO: 100971 - protein, 638 aa, Homo sapiens
MAAPLLHTRLPGDAAASSSAVKKLGASRTGISNMRALENDFFNSPPRKTVRFGGTVTEVLLKYKKGETNDFELLKNQLLDPDIKDDQIINWLLEFRSSIMYLTKDFEQLISIILRLPWLNRSQTVVEEYLAFLGNLVSAQTVFLRPCLSMIASHFVPPRVIIKEGDVDVSDSDDEDDNLPANFDTCHRALQIIARYVPSTPWFLMPILVEKFPFVRKSERTLECYVHNLLRISVYFPTLRHEILELIIEKLLKLDVNASRQGIEDAEETATQTCGGTDSTEGLFNMDEDEETEHETKAGPERLDQMVHPVAERLDILMSLVLSYMKDVCYVDGKVDNGKTKDLYRDLINIFDKLLLPTHASCHVQFFMFYLCSFKLGFAEAFLEHLWKKLQDPSNPAIIRQAAGNYIGSFLARAKFIPLITVKSCLDLLVNWLHIYLNNQDSGTKAFCDVALHGPFYSACQAVFYTFVFRHKQLLSGNLKEGLQYLQSLNFERIVMSQLNPLKICLPSVVNFFAAITNKYQLVFCYTIIERNNRQMLPVIRSTAGGDSVQICTNPLDTFFPFDPCVLKRSKKFIDPIYQVWEDMSAEELQEFKKPMKKDIVEDEDDDFLKGEVPQNDTVIGITPSSFDTHFRSPSSSF

SEQ ID NO: 100972 - protein, 93 aa, Homo sapiens
MEGHYVHAGNIIATQRHFRWHPGAHVGVGKNKCLYALEEGIVRYTKEVYVPHPRNTEAVDLITRLPKGAVLYKTFVHVVPAKPEGTFKLVAML

SEQ ID NO: 100973 - protein, 202 aa, Homo sapiens
MALRLLKLAATSASARVVAAGAQRVRGIHSSVQCKLRYGMWHFLLGDKASKRLTERSRVITVDGNICTGKGKLAKEIAEKLGFKHFPEAGIHYPDSTTGDGKPLATDYNGNCSLEKFYDDPRSNDGNSYRLQSWLYSSRLLQYSDALEHLLTTGQGVVLERSIFSDFVFLEAMYNQGFIRKQLKNVRFYNILQGKLKIQKRW

SEQ ID NO: 100974 - protein, 198 aa, Homo sapiens
MSRPLLITFTPATDPSDLWKDGQQQPQPEKPESTLDGAAALAFYEALIGDESSAPDSQRSQTEPARERKRKKRRIMKAPAAEAVAEGASGRHGQGRSLEAEDKMTHRILRAAQEGDLPELRRLLEPHEAGGAGGNINARDAFWWTPLMCAARAGQGAAVSYLLGRGAAWVGVCELSGRDAAQLAEEAGFPEVARMVRE

SEQ ID NO: 100975 - protein, 37 aa, Homo sapiens
MPLEQRSQHCKPEEGLEARGEALGLVGAQAPATEEQQ

SEQ ID NO: 100976 - protein, 704 aa, Homo sapiens
MGDYGFGVLVQSNTGNKSAFPVRFHPHLQPPHHHQNATPSPAAFINNNTAANGSSAGSAWLFPAPATHNIQDEILGSEKAKSQQQEQQDPLEKQQLSPSPGQEAGILPETEKAKSEENQGDNSSENGNGKEKIRIESPVLTGFDYQEATGLGTSTQPLTSSASSLTGFSNWSAAIAPSSSTIINEDASFFHQGGVPAASANNGALLFQNFPHHVSPGFGGSFSPQIGPLSQHHPHHPHFQHHHSQHQQQRRSPASPHPPPFTHRNAAFNQLPHLANNLNKPPSPWSSYQSPSPTPSSSWSPGGGGYGGWGGSQGRDHRRGLNGGITPLNSISPLKKNFASNHIQLQKYARPSSAFAPKSWMEDSLNRADNIFPFPDRPRTFDMHSLESSLIDIMRAENDTIKGQSSLFPMEDGFLDDGRGDQPLHSGLGSPHCFSHQNGERVERYSRKVFVGGLPPDIDEDEITASFRRFGPLIVDWPHKAESKSYFPPKGYAFLLFQDESSVQALIDACIEEDGKLYLCVSSPTIKDKPVQIRPWNLSDSDFVMDGSQPLDPRKTIFVGGVPRPLRAVELAMIMDRLYGGVCYAGIDTDPELKYPKGAGRVAFSNQQSYIAAISARFVQLQHGEIDKRVEVKPYVLDDQLCDECQGARCGGKFAPFFCANVTCLQYYCEYCWAAIHSRAGREFHKPLVKEGGDRPRHISFRWN

SEQ ID NO: 100977 - protein, 238 aa, Homo sapiens
MSAEVETSEGVDESEKKNSGALEKENQMRMADLSELLKEGTKEAHDRAENTQFVKDFLKGNIKKELFKLATTALYFTYSALEEEMERNKDHPAFAPLYFPMELHRKEALTKDMEYFFGENWEEQVQCPKAAQKYVERIHYIGQNEPELLVAHAYTRYMGDLSGGQVLKKVAQRALKLPSTGEGTQFYLFENVDNAQQFKQLYRARMNALDLNMKTKERIVEEANKAFEYNMQIFNELD

SEQ ID NO: 100978 - protein, 240 aa, Homo sapiens
MIETYNQTSPRSAATGLPISMKIFMYLLTVFLITQMIGSALFAVYLHRRLDKIEDERNLHEDFVFMKTIQRCNTGERSLSLLNCEEIKSQFEGFVKDIMLNKEETKKENSFEMQKVLQWAEKGYYTMSNNLVTLENGKQLTVKRQGLYYIYAQVTFCSNREASSQAPFIASLCLKSPGRFERILLRAANTHSSAKPCGQQSIHLGGVFELQPGASVFVNVTDPSQVSHGTGFTSFGLLKL

SEQ ID NO: 100979 - protein, 48 aa, Homo sapiens
MVQALTTTRIQRQAEGFQCWRGCWWVLPRPWLFLGSRRIALEASSLAR

SEQ ID NO: 100980 - protein, 192 aa, Homo sapiens
MAGPQQQPPYLHLAELTASQFLEIWKHFDADGNGYIEGKELENFFQELEKARKGSGMMSKSDNFGEKMKEFMQKYDKNSDGKIEMAELAQILPTEENFLLCFRQHVGSSAEFMEAWRKYDTDRSGYIEANELKGFLSDLLKKANRPYDEPKLQEYTQTILRMFDLNGDGKLGLSEMSRIEAATLTSMSWMPF

SEQ ID NO: 100981 - protein, 364 aa, Homo sapiens
MDQGYGGYGAWSAGPANTQGAYGTGVASWQGYENYNYYGAQNTSVTTGATYSYGPASWEAAKANDGGLAAGAPAMHMASYGPEPCTDNSDSLIAKINQRLDMMSKEGGRGGSGGGGEGIQDRESSFRFQPFESYDSRPCLPEHNPYRPSYSYDYEFDLGSDRNGSFGGQYSECRDPARERGSLDGFMRGRGQGRFQDRSNPGTFMRSDPFVPPAASSEPLSTPWNELNYVGGRGLGGPSPSRPPPSLFSQSMAPDYGVMGMQGAGGYDSTMPYGCGRSQPRMRDRDRPKRRGFDRFGPDGTGRKRKQFQLYEEPDTKLARVDSEGDFSENDDAAGDFRSGDEEFKGEDELCDSGRQRGPATYPG

SEQ ID NO: 100982 - protein, 186 aa, Homo sapiens
MAAAEEGCSVGAEADRELEELLESALDDFDKAKPSPAPPSTTTAPDASGPQKRSPGDTAKDALFASQEKFFQELFDSELASQATAEFEKAMKELAEEEPHLVEQFQKLSEAAGRVELQHVGRRADQGHGGARHGRRGWGREHPPHHAEYYAEPTLQGCAVPITEGDHRKVSRMVAESSGISTSRAV

SEQ ID NO: 100983 - protein, 333 aa, Homo sapiens
MATQVMGQSSGGGGLFTSSGNIGMALPNDMYDLHDLSKAELAAPQLIMLANVALTGEVNGSCCDYLVGEERQMAELMPVGDNNFSDSEEGEGLEESADIKGEPHGLENMELRSLELSVVEPQPVFEASGAPDIYSSNKDLPPETPGAEDKGKSSKTKPFRCKPCQYEAESEEQFVHHIRVHSAKKFFVEESAEKQAKARESGSSTAEEGDFSKGPIRCDRCGYNTNRYDHYTAHLKHHTRAGDNERVYKCIICTYTTVSEYHWRKHLRNHFPRKVYTCGKCNYFSDRKNNYVQHVRTHTGERPYKCELCPYSSSQKTHLTRHMRTHSGWNKMV

SEQ ID NO: 100984 - protein, 712 aa, Homo sapiens
MLGLRPPLLALVGLLSLGCVLSQECTKFKVSSCRECIESGPGCTWCQKLNFTGPGDPDSIRCDTRPQLLMRGCAADDIMDPTSLAETQEDHNGGQKQLSPQKVTLYLRPGFGSFVDKTVLPFVNTHPDKLRNPCPNKEKECQPPFAFRHVLKLTNNSNQFQTEVGKQLISGNLDAPEGGLDAMMQVAACPEEIGWRNVTRLLVFATDDGFHFAGDGKLGAILTPNDGRCHLEDNLYKRSNEFDYPSVGQLAHKLAENNIQPIFAVTSRMVKTYEKLTEIIPKSAVGELSEDSSNVVHLIKNAYNKLSSRVFLDHNALPDTLKVTYDSFCSNGVTHRNQPRGDCDGVQINVPITFQVKVTATECIQEQSFVIRALGFTDIVTVQVLPQCECRCRDQSRDRSLCHGKGFLECGICRCDTGYIGKNCECQTQGRSSQELEGSCRKDNNSIICSGLGDCVCGQCLCHTSDVPGKLIYGQYCECDTINCERYNGQVCGGPGRGLCFCGKCRCHPGFEGSACQCERTTEGCLNPRRVECSGRGRCRCNVCECHSGYQLPLCQECPGCPSPCGKYISCAECLKFEKGPFGKNCSAACPGLQLSNNPVKGRTCKERDSEGCWVAYTLEQQDGMDRYLIYVDESRECVAGPNIAAIVGGTVAGIVLIGILLLVIWKALIHLSDLREYRRFEKEKLKSQWNNDNPLFKSATTTVMNPKFAES

SEQ ID NO: 100985 - protein, 169 aa, Homo sapiens
MEAALLGLCNWSTLGVCAALKLPQISAVLAARSARGLSLPSLLLELAGFLVFLRYQCYYGYPPLTYLEYPILIAQDVILLLCIFHFNGNVKQATPYIAVLVSSWFILALQKWIIDLAMNLCTFISAASKFAQLQCLWKTRDSGTVSALTWSLSSYTCARSRSLSQAGVQ

SEQ ID NO: 100986 - protein, 93 aa, Homo sapiens
MSAKDERAREILRGFKLNWMNLRDAETGKILWQGTEDLSVPGVEHEARVPKKILKCKAVSRELNFSSTEQMEKFRLEQKVYFKGQCLEVGTLS

SEQ ID NO: 100987 - protein, 216 aa, Homo sapiens
MVQKTSMSRGPYPPSQEIPMEVFDPSPQGKYSKRKGRFKRSDGSTSSDTTSNSFVRQGSAESYTSRPSDSDVSLEEDREALRKEAERQALAQLEKAKTKPVAFAVRTNVGYNPSPGDEVPVQGVAITFEPKDFLHIKEKYNNDWWIGRLVKEGCEVGFIPSPVKLDSLRLLQEQKLRQNRLGSSKSGDNSSSSLGDVVTGTRRPTPPASDRACAPL

SEQ ID NO: 100988 - protein, 187 aa, Homo sapiens
MLLILLSVALLAFSSAQDLNEDVSQEDVPLVISDGGDSEQFLDEERQGPPLGGQQSQPSAGDGNQDDGPQQGPPQQGGQQQQGPPPPQGKPQGPPQQGGQQQQGPPPPQGKPQGPPQQGGHPPPPQGRPQGPPQQGGHPRPPRGRPQGPPQQGGHQQGPPPPPPGKPQGPPPQGGRPQGPPQGQSPQ

SEQ ID NO: 100989 - protein, 344 aa, Homo sapiens
MATALDPDQPKKQKILVEEMAPLKGVQEQQVRHECEVTKPEKEKGEETRIENGKLIVVTDSCGRVESSGKISEPMEAHNEGSNLERHQAKPKEKIEYKCSEREQRFIQHLDLIEHASTHTGKKLCESDVCQSSSLTGHKKVLSREKGHQCHECGKAFQRSSHLVRHQKIHLGEKPYQCNECGKVFSQNAGLLEHLRIHTGEKPYLCIHCGKNFRRSSHLNRHQRIHSQEEPCECKECGKTFSQALLLTHHQRIHSHSKSHQCNECGKAFSLTSDLIRHHRIHTGEKPFKCNICQKAFRLNSHLAQHVRIHNEEKPYQCSECGEAFRQRSGLFQHQRYHHKDKLA

SEQ ID NO: 100990 - protein, 300 aa, Homo sapiens
MMLSLNNLQNIIYNPVIPFVGTIPDQLDPGTLIVIRGHVPSDADRFQVDLQNGSSMKPRADVAFHFNPRFKRAGCIVCNTLINEKWGREEITYDTPFKREKSFEIVIMVLKDKFQVPKSGTPQLPSNRGGDISKIAPRTVYTKSKDSTVNHTLTCTKIPPMNYVSKRLPFAARLNTPMGPGRTVVVKGEVNANAKSFNVDLLAGKSKDIALHLNPRLNIKAFVRNSFLQESWGEEERNITSFPFSPGMYFEMIIYCDVREFKVAVNGVHSLEYKHRFKELSSIDTLEINGDIHLLEVRSW

SEQ ID NO: 100991 - protein, 375 aa, Homo sapiens
MSRARSHLRAALFLAAASARGITTQVAARRGLSAWPVPQEPSMEYQDAVRMLNTLQTNAGYLEQVKRQRGDPQTQLEAMELYLARSGLQVEDLDRLNIIHVTGTKGKGSTCAFTECILRSYGLKTGFFSSPHLVQVRERIRINGQPISPELFTKYFWRLYHRLEETKDGSCVSMPPYFRFLTLMAFHVFLQEKVDLAVVEVGIGGAYDCTNIIRKPVVCGVSSLGIDHTSLLGDTVEKIAWQKGGIFKQGVPAFTVLQPEGPLAVLRDRAQQISVLGSQRHPGQGSCGSCPWHLCSSPHPTCGSGFGTRSGRAGRRCCGAGPSPGTWTVRTPPAARRPACAGSARRCRAARGRAVAPRFESCSSMLPGTGTRRPC

SEQ ID NO: 100992 - protein, 1650 aa, Homo sapiens
MERCSRCHRLLLLLPLVLGLSAAPGWAGAPPVDVLRALRFPSLPDGVRRAKGICPADVAYRVARPAQLSAPTRQLFPGGFPKDFSLLTVVRTRPGLQAPLLTLYSAQGVRQLGLELGRPVRFLYEDQTGRPQPPSQPVFRGLSLADGKWHRVAVAVKGQSVTLIVDCKKRVTRPLPRSARPVLDTHGVIIFGARILDEEVFEGDVQELAIVPGVQAAYESCEQKELECEGGQRERPQNQQPHRAQRSPQQQPSRLHRPQNQEPQSQDPTPGEEEEILESSLLPPLEEAAHGPRGLKGEKGEPAVLEPGMLVEGPPGPEGPAGLIGPPGIQGNPGPVGDPGERGPPGRAGLPGSDGAPGPPGTSLMLPFRFGSGGGDKGPVVAAQEAQAQAILQQARLALRGPPGPMGYTGRPGPLGQPGSPGLKGESGDLGPQGPRGPQGLTGPPGKAGRRGRAGADGARGMPGDPGVKGDRGFDGLPGLPGEKGHRGDTGAQGLPGPPGEDGERGDDGEIGPRGLPGESGPRGLLGPKGPPGIPGPPGVRGMDGPQGPKGSLGPQGEPGPPGQQGTPGTQGLPGPQGAIGPHGEKGPQGKPGLPGMPGSDGPPGHPGKEGPPGTKGNQGPSGPQGPLGYPGPRGVKGVDGIRGLKGHKGEKGEDGFPGFKGDIGVKGDRGEVGVPGSRGEDGPEGPKGRTGPTGDPGPPGLMGEKGKLGVPGLPGYPGRQGPKGSLGFPGFPGASGEKGARGLSGKSGPRGERGPTGPRGQRGPRGATGKSGAKGTSGGDGPHGPPGERGLPGPQGPNGFPGPKGPPGPPGKDGLPGHPGQRGEVGFQGKTGPPGPPGVVGPQGAAGETGPMGERGHPGPPGPPGEQGLPGTAGKEGTKGDPGPPGAPGKDGPAGLRGFPGERGLPGTAGGPGLKGNEGPSGPPGPAGSPGERGAAGSGGPIGPPGRPGPQGPPGAAGEKGVPGEKGPIGPTGRDGVQGPVGLPGPAGPPGVAGEDGDKGEVGDPGQKGTKGNKGEHGPPGPPGPIGPVGQPGAAGADGEPGARGPQGHFGAKGDEGTRGFNGPPGPIGLQGLPGPSGEKGETGDVGPMGPPGPPGPRGPAGPNGADGPQGPPGGVGNLGPPGEKGEPGESGSPGIQGEPGVKGPRGERGEKGESGQPGEPGPPGPKGPTGDDGPKGNPGPVGFPGDPGPPGEGGPRGQDGAKGDRGEDGEPGQPGSPGPTGENGPPGPLGKRGPAGSPGSEGRQGGKGAKGDPGAIGAPGKTGPVGPAGPAGKPGPDGLRGLPGSVGQQGRPGATGQAGPPGPVGPPGLPGLRGDAGAKGEKGHPGLIGLIGPPGEQGEKGDRGLPGPQGSPGQKGEMGIPGASGPIGPGGPPGLPGPAGPKGAKGATGPGGPKGEKGVQGPPGHPGPPGEVIQPLPIQMPKKTRRSVDGSRLMQEDEAIPTGGAPGSPGGLEEIFGSLDSLREEIEQMRRPTGTQDSPARTCQDLKLCHPELPDGEYWVDPNQGCARDAFRVFCNFTAGGETCVTPRDDVTQFSYVDSEGSPVGVVQLTFLRLLSVSAHQDVSYPCSGAARDGPLRLRGANEDELSPETSPYVKEFRDGCQTQQGRTVLEVRTPVLEQLPVLDASFSDLGAPPRRGGVLLGPVCFMG

SEQ ID NO: 100993 - protein, 71 aa, Homo sapiens
MLMPDDFKAYSKIKVDNHLFNKENLPSRFKFKEYCPMVFRNLRERFGIDDQDYQNSVTRSAPINSDSQGRC

SEQ ID NO: 100994 - protein, 1446 aa, Homo sapiens
MVSSGCRMRSLWFIIVISFLPNTEGFSRAALPFGLVRRELSCEGYSIDLRCPGSDVIMIESANYGRTDDKICDADPFQMENTDCYLPDAFKIMTQRCNNRTQCIVVTGSDVFPDPCPGTYKYLEVQYECVPYIFVCPGTLKAIVDSPCIYEAEQKAGAWCKDPLQAADKIYFMPWTPYRTDTLIEYASLEDFQNSRQTTTYKLPNRVDGTGFVVYDGAVFFNKERTRNIVKFDLRTRIKSGEAIINYANYHDTSPYRWGGKTDIDLAVDENGLWVIYATEQNNGMIVISQLNPYTLRFEATWETVYDKRAASNAFMICGVLYVVRSVYQDNESETGKNSIDYIYNTRLNRGEYVDVPFPNQYQYIAAVDYNPRDNQLYVWNNNFILRYSLEFGPPDPAQVPTTAVTITSSAELFKTIISTTSTTSQKGPMSTTVAGSQEGSKGTKPPPAVSTTKIPPITNIFPLPERFCEALDSKGIKWPQTQRGMMVERPCPKGTRGTASYLCMISTGTWNPKGPDLSNCTSHWVNQLAQKIRSGENAASLANELAKHTKGPVFAGDVSSSVRLMEQLVDILDAQLQELKPSEKDSAGRSYNKAIVDTVDNLLRPEALESWKHMNSSEQAHTATMLLDTLEEGAFVLADNLLEPTRVSMPTENIVLEVAVLSTEGQIQDFKFPLGIKGAGSSIQLSANTVKQNSRNGLAKLVFIIYRSLGQFLSTENATIKLGADFIGRNSTIAVNSHVISVSINKESSRVYLTDPVLFTLPHIDPDNYFNANCSFWNYSERTMMGYWSTQGCKLVDTNKTRTTCACSHLTNFAILMAHREIAYKDGVHELLLTVITWVGIVISLVCLAICIFTFCFFRGLQSDRNTIHKNLCINLFIAEFIFLIGIDKTKYAIACPIFAGLLHFFFLAAFAWMCLEGVQLYLMLVEVFESEYSRKKYYYVAGYLFPATVVGVSAAIDYKSYGTEKACWLHVDNYFIWSFIGPVTFIILLNIIFLVITLCKMVKHSNTLKPDSSRLENIKSWVLGAFALLCLLGLTWSFGLLFINEETIVMAYLFTIFNAFQGVFIFIFHCALQKKVRKEYGKCFRHSYCCGGLPTESPHSSVKASTTRTSARYSSGTQSRIRRMWNDTVRKQSESSFISGDINSTSTLNQGMTGNYLLTNPLLRPHGTNNPYNTLLAETVVCNAPSAPVFNSPGHSLNNARDTSAMDTLPLNGNFNNSYSLHKGDYNDSVQVVDCGLSLNDTAFEKMIISELVHNNLRGSSKTHNLELTLPVKPVIGGSSSEDDAIVADASSLMHSDNPGLELHHKELEAPLIPQRTHSLLYQPQKKVKSEGTDSYVSQLTAEAEDHLQSPNRDSLYTSMPNLRDSPYPESSPDMEEDLSPSRRSENEDIYYKSMPNLGAGHQLQMCYQISRGNSDGYIIPINKEGCIPEGDVREGQMQLVTSL

SEQ ID NO: 100995 - protein, 245 aa, Homo sapiens
MELRAKEEERLNKLRLESEGSPETLTNLRKGYLFMYNLVQFLGFSWIFVNLTVRFCILGKESFYDTFHTVADMMYFCQMLAVVETINAAIGVTTSPVLPSLIQLLGRNFILFIIFGTMEEMQNKAVVFFVFYLWSAIEIFRYSFYMLTCIDMDWKVLTWLRYTLWIPLYPLGCLAEAVSVIQSIPIFNETGRFSFTLPYPVKIKVRFSFFLQIYLIMIFLGLYINFRHLYKQRRRRYGQKKKKIH

SEQ ID NO: 100996 - protein, 118 aa, Homo sapiens
MLSVQPDTKPKGCAGCNRKIKDRYLLKALDKYWHEDCLKCACCDCRLGEVGSTLYTKANLILCRRDYLRLFGVTGNCAACSKLIPAFEMVMRAKDNVYHLDCFACQLCNQRFCVGDKF

SEQ ID NO: 100997 - protein, 348 aa, Homo sapiens
MSLLVVSMACVGFFLLQGAWPHEGVHRKPSLLAHPGRLVKSEETVILQCWSDVMFEHFLLHREGMFNDTLRLIGEHHDGVSKANFSISRMTQDLAGTYRCYGSVTHSPYQVSAPSDPLDIVIIGLYEKPSLSAQPGPTVLAGENVTLSCSSRSSYDMYHLSREGEAHERRLPAGTKVNGTFQANFPLGPATHGGTYRCFGSFRDSPYEWSKSSDPLLVSVTGNPSNSWPSPTEPSSETGNPRHLHILIGTSVVIILFILLFFLLHRWCSNKKNAAVMDQESAGNRTANSEDSDEQDPQEVTYTQLNHCVFTQRKITRPSQRPKTPPTDIIVYTELPNAESRSKVVSCP

SEQ ID NO: 100998 - protein, 119 aa, Homo sapiens
MGIQGGSVLFGLLLVLAVFCHSGHSLQCYNCPNPTADCKTAVNCSSDFDACLITKAELGYHYVAQAGRRQSSHFSLLKCWDYRCEPSHWPHCPYFNWGYKCITSVGSLSIAISTTSQPA

SEQ ID NO: 100999 - protein, 64 aa, Homo sapiens
MRGPSGPPGLLYVPHLLLCLLCLLPPPLQYAAGQSQMPKDQPLWALLEQYCHTIMTLTNLSGWS

SEQ ID NO: 101000 - protein, 46 aa, Homo sapiens
MNRFRVSKFRHTEARPPRREVYWALCLCKAKERTSDAWPTWAAIQT

SEQ ID NO: 101001 - protein, 18 aa, Homo sapiens
PLIMNSIKSFSDHAQCGR

SEQ ID NO: 101002 - protein, 53 aa, Homo sapiens
MAAASPLRDCQAWKDARLPLSTTSNEACKLFDATLTQDSEWWVDSGGCSGDVF

SEQ ID NO: 101003 - protein, 89 aa, Homo sapiens
MTLGSPRKGLLMLLMALVTQGDPVKPSRGPLVTCTCESPHCKGPTCRGAWCTVVLVREEGRHPQEHRGCGNLHRELCRGRPTEFVNHYC

SEQ ID NO: 101004 - protein, 103 aa, Homo sapiens
MKFQYKEDHPFEYRKKEGEKIRKKYPDRVPVSVEERRGWEGKGPRGRGRVVEMASLGRPGGSGEGRFRELLNPERPSVPEPMDVQTVELLKPRMPGPRTPLQG

SEQ ID NO: 101005 - protein, 36 aa, Homo sapiens
MAARRALHFVFKVGNRFQTARFYRDVLGMKSVLKTL

SEQ ID NO: 101006 - protein, 106 aa, Homo sapiens
MQRAAAEMWYGVFLWALVSSLFFHVPAGLLALFTLRHHKYGRFMSVSILLMGIVGPITAGILTSAAIAGVYRAAGKEMIPFEALTLGTGQTFCVLVVSFLRILATL

SEQ ID NO: 101007 - protein, 113 aa, Homo sapiens
MLPAVGSVDEEEDPAEEDCPELVPIETTQSEEEEKSGLGAKIPVTIITGYLGAGKTTLLNYILTEQHSKRVAVILNESGEGSALEKSLAVSQGGELYEEWLELRNGCLCCSVK

SEQ ID NO: 101008 - protein, 117 aa, Homo sapiens
MAAAYLDPNLNHTPNSSTKTHLGTGMERSPGAMERVLKVFHYFESNSEPTTWASIIRHGDATDVRGIIQKIVDSHKVKHVACYGFRLSHLRSEEVHWLHVDMGVSSVREKYELAHPP

SEQ ID NO: 101009 - protein, 78 aa, Homo sapiens
MLSSAYISDHMKVHSQGPHHVCELCNKGTGEVCPMAAAAAAAAAAAAAAVAAPPTAVGSLSGAEGVPVSSQPLPSQPW

SEQ ID NO: 101010 - protein, 88 aa, Homo sapiens
MKSSQTFEEQTECIVNTLLMDFLSPTLQVASRNLCCVDEVDSGEPCSFDVAIIAGRLRMLGDQFNGELEASAKNVIAETIKGQENLES

SEQ ID NO: 101011 - protein, 399 aa, Homo sapiens
MSMSPTVIILACLGFFLDQSVWAHVGGQDKPFCSAWPSAVVPQGGHVTLRCHCRRGFNIFTLYKKDGVPVPELYNRIFWNSFLISPVTPAHAGTYRCRGFHPHSPTEWSAPSNPLVIMVTGLYEKPSLTARPGPTVRAGENVTLSCSSQSSFDIYHLSREGEAHELRLPAVPSINGTFQADFPLGPATHGETYRCFGSFHGSPYEWSDPSDPLPVSVTGNPSSSWPSPTEPSFKTGIARHLHAVIRYSVAIILFTILPFFLLHRWCSKKKVSLTKQRPENSGPCAEAGWEHADAAVMNQEPAGHRTVNREDSDEQDPQEVTYAQLDHCIFTQRKITGPSQRSKRPSTDTSVCIELPNAEPRALSPAHEHHSQALMGSSRETTALSQTQLASSNVPAAGI

SEQ ID NO: 101012 - protein, 153 aa, Homo sapiens
MAAGTAVGAWVLVLSLWGAVVGAQNITARIGEPLVLKCKGAPKKPPQRLEWKLNTGRTEAWKVLSPQGGGPWDSVARVLPNGSLFLPAVGIQDEGILGGLGTAALLIGVILWQRRQRRGEERKAPENQEEEEERAELNQSEEPEAGESSTGGP

SEQ ID NO: 101013 - protein, 381 aa, Homo sapiens
MRFTFPLMAIVLEIAMIVLFGLFVEYETDQTVLEQLNITKPTDMGIFFELYPLFQDVHVMIFVGFGFLMTFLKKYGFSSVGINLLVAALGLQWGTIVQGILQSQGQKFNIGIKNMINADFSAATVLISFGAVLGKTSPTQMLIMTILEIVFFAHNEYLVSEIFKASDIGASMTIHAFGAYFGLAVAGILYRSGLRKGHENEESAYYSDLFAMIGTLFLWMFWPSFNSAIAEPGDKQCRAIVNTYFSLAACVLTAFAFSSLVEHRGKLNMVHIQNATLAGGVAVGTCADMAIHPFGSMIIGSIAGMVSVLGYKFLTPLFTTKLRIHDTCGVHNLHGLPGVVGGLAGIVAVAMGASNTSMAMQAAALGSSIGTAVVGGLMTGP

SEQ ID NO: 101014 - protein, 803 aa, Homo sapiens
MTELKAKGPRAPHVAGGPPSPEVGSPLLCRPAAGPFPGSQTSDTLPEVSAIPISLDGLLFPRPCQGQDPSDEKTQDQQSLSDVEGAYSRAEATRGAGGSSSSPPEKDSGLLDSVLDTLLAPSGPGQSQPSPPACEVTSSWCLFGPELPEDPPAAPATQRVLSPLMSRSGCKVGDSSGTAAAHKVLPRGLSPARQLLLPASESPHWSGAPVKPSPQAAAVEVEEEDGSESEESAGPLLKGKPRALGGAAAGGGAAAVPPGAAAGGVALVPKEDSRFSAPRVALVEQDAPMAPGRSPLATTVMDFIHVPILPLNHALLAARTRQLLEDESYDGGAGAASAFAPPRSSPCASSTPVAVGDFPDCAYPPDAEPKDDAYPLYSDFQPPALKIKEEEEGAEASARSPRSYLVAGANPAAFPDFPLGPPPPLPPRATPSRPGEAAVTAAPASASVSSASSSGSTLECILYKAEGAPPQQGPFAPPPCKAPGASGCLLPRDGLPSTSASAAAAGAAPALYPALGLNGLPQLGYQAAVLKEGLPQVYPPYLNYLRPDSEASQSPQYSFESLPQKICLICGDEASGCHYGVLTCGSCKVFFKRAMEGQHNYLCAGRNDCIVDKIRRKNCPACRLRKCCQAGMVLGGRKFKKFNKVRVVRALDAVALPQPVGVPNESQALSQRFTFSPGQDIQLIPPLINLLMSIEPDVIYAGHDNTKPDTSSSLLTSLNQLGERQLLSVVKWSKSLPGFRNLHIDDQITLIQYSWMSLMVFGLGWRSYKHVSGQMLYFAPDLILNESHRSLSSFKLAKKSSSV

SEQ ID NO: 101015 - protein, 625 aa, Homo sapiens
MRLPERHGGPQGSLCLMDPCCPLSLALQDLVERDCNGDTPNLSFYRNEIRFLPNGCFIEDILQNWTDNYDLLEDNHSYIQWLFPLREPGVNWHAKPLTLREVEVFKSSQEIQERLVRAYELMLGFYGIRLEDRGTGTVGRAQNYQKRFQNLNWRSHNNLRITRILKSLGELGLEHFQAPLVRFFLEETLVRRELPGVRQSALDYFMFAVRCRHQRRQLVHFAWEHFRPRCKFVWGPQDKLRRFKPSSLPHPLEGSRKVEEEGSPGDPDHEASTQGRTCGPEHSKGGGRVDEGPQPRSVEPQDAGPLERSQGDEAGGHGEDRPEPLSPKESKKRKLELSRREQPPTEPGPQSASEVEKIALNLEGCALSQGSLRTGTQEVGGQDPGEAVQPCRQPLGARVADKVRKRRKVDEGAGDSAAVASGGAQTLALAGSPAPSGHPKAGHSENGVEEDTEGRTGPKEGTPGSPSETPGPSPAGPAGDEPAESPSETPGPRPAGPAGDEPAESPSETPGPRPAGPAGDEPAESPSETPGPSPAGPTRDEPAESPSETPGPRPAGPAGDEPAESPSETPGPRPAGPAGDEPAESPSETPGPSPAGPTRDEPAKAGEAAELQDAEVESSAKSGKP

SEQ ID NO: 101016 - protein, 36 aa, Homo sapiens
MGQGWATAGLPSLLFLLLCYGHPLLVPSQEASQQTW

SEQ ID NO: 101017 - protein, 44 aa, Homo sapiens
MPEQFSVAEFLAVTAEDLSSPAGAAAFAAKMPRSWKETKPSCRE

SEQ ID NO: 101018 - protein, 261 aa, Homo sapiens
  MOD_RES (1)..(1): Any amino acid
XANGAGALSYVSPNTSKCPVTIPEDQKKFIDQVVEKIEDLLQSEENKNLDLEPCTGFQRKLIYQTLSWKYPKGIHVETLETEKEELNDAVGFSRVIHAIANSGKLVIGHNMLLDVMHTVHQFYCPLPADLSEFKEMTTCVFPRLLDTKLMASTQPFKDIINNTSLAELEKRLKETPFNPPKVESAEGFPSYDTASEQLHEAGYDAYITGLCFISMANYLGSFLSPPKIHVSARSKLIEPFFNKLFLMRVMDIPYLNLEGPD

SEQ ID NO: 101019 - protein, 86 aa, Homo sapiens
MIDSVKLRRDSAADFFSHYEYLCALQNSVPLPAVRACLREGVLDFNADRLRGVDWAPLLSTLKINKDLPLVSIKSFFQPWLGDTGL

SEQ ID NO: 101020 - protein, 48 aa, Homo sapiens
MITSAAGIISLLDEDEPQLKEFALHKLNAVVNDFWAEISESVDKIKMH

SEQ ID NO: 101021 - protein, 455 aa, Homo sapiens
MCNTNMSVPTDGAVTTSQIPASEQETLVRPKPLLLKLLKSVGAQKDTYTMKEENIYHDLQELGSSQSAGKMHMYIYMESSDSGTSVSENRCHLEGGSDQKDLVQELQEEKPSSSHLVSRPSTSSRRRAISETEENSDELSGERQRKRHKSDSISLSFDESLALCVIREICCERSSSSESTGTPSNPDLDAGVSEHSGDWLDQDSVSDQFSVEFEVESLDSEDYSLSEEGQELSDEDDEVYQVTVYQAGESDTDSFEEDPEISLADYWKCTSCNEMNPPLPSHCNRCWALRENWLPEDKGKDKGEISEKAKLENSTQAEEGFDVPDCKKTIVNDSRESCVEENDDKITQASQSQESEDYSQPSTSSSIIYSSQEDVKEFEREETQDKEESVESSLPLNAIEPCVICQGRPKNGCIVHGKTGHLMACFTCAKKLKKRNKPCPVCRQPIQMIVLTYFP

SEQ ID NO: 101022 - protein, 617 aa, Homo sapiens
MELYTGLQKLTIKNSGLRSIQPRAFAKNPHLRYINLSSNRLTTLSWQLFQTLSLRELQLEQNFFNCSCDIRWMQLWQEQGEAKLNSQNLYCINADGSQLPLFRMNISQCDLPEISVSHVNLTVREGDNAVITCNGSGSPLPDVDWIVTGLQSINTHQTNLNWTNVHAINLTLVNVTSEDNGFTLTCIAENVVGMSNASVALTVYYPPRVVSLEEPELRLEHCIEFVVRGNPPPTLHWLHNGQPLRESKIIHVEYYQEGEISEGCLLFNKPTHYNNGNYTLIAKNPLGTANQTINGHFLKEPFPESTDNFILFDEVSPTPPITVTHKPEEDTFGVSIAVGLAAFACVLLVVLFVMINKYGRRSKFGMKGPVAVISGEEDSASPLHHINHGITTPSSLDAGPDTVVIGMTRIPVIENPQYFRQGHNCHKPDTYVQHIKRRDIVLKRELGEGAFGKVFLAECYNLSPTKDKMLVAVKALKDPTLAARKDFQREAELLTNLQHEHIVKFYGVCGDGDPLIMVFEYMKHGDLNKFLRAHGPDAMILVDGQPRQAKGELGLSQMLHIASQIASGMVYLASQHFVHRDLATRNCLVGANLLVKIGDFGMSRDVYSTDYYRVVQA

SEQ ID NO: 101023 - protein, 291 aa, Homo sapiens
MSSTLPALLCVETLPKPFIWAEPHFMVPKEKQVTICCQGNYGAVEYQLHFEGSLFAVDRPKPPERINKVKFYIPDMNSRMAGQYSCIYRVGELWSEPSNLLDLVVTEMYDTPTLSVHPGPEVISGEKVTFYCRLDTATSMFLLLKEGRSSHVQRGYGKVQAEFPLGPVTTAHRGTYRCFGSYNNHAWSFPSEPVKLLVTGDIENTSLAPEDPTFPDTWGTYLLTTETGLQKDHALWDHTAQNLLRMGLAFLVLVALVWFLVEDWLSRKRTRERASRASTWEGRRRLNTQTL

SEQ ID NO: 101024 - protein, 336 aa, Homo sapiens
MAGLRNESEQEPLLGDTPGSREWDILETEEHYKSRWRSIRILYLTMFLSSVGFSVVMMSIWPYLQKIDPTADTSFLGWVIASYSLGQMVASPIFGLWSNYRPRKEPLIVSILISVAANCLYAYLHIPASHNKYYMLVARGLLGIGAGNVAVVRSYTAGATSLQERTSSMANISMCQALGFILGPVFQTCFTFLGEKGVTWDVIKLQINMYTTPVLLSAFLGILNIILILAILREHRVDDSGRQCKSINFEEASTDEAQVPQGNIDQVAVVAINVLFFVTLFIFALFETIITPLTMDMYAWTQEQAVLYNGIILAALGVEAVVIFLGVKLLSKKFAQ

SEQ ID NO: 101025 - protein, 394 aa, Homo sapiens
MAVMAPRTLLLLLSGALALTQTWAGSHSMRYFFTSVSRPGRGEPRFIAVGYVDDTQFVRFDSDAASQKMEPRAPWIEQEGPEYWDQETRNMKAHSQTDRANLGTLRGYYNQSEDGSHTIQIMYGCDVGPDGRFLRGYRQDAYDGKDYIALNEDLRSWTAADMAAQITKRKWEAVHAAEQRRVYLEGRCVDGLRRYLENGKETLQRTDPPKTHMTHHPISDHEATLRCWALGFYPAEITLTWQRDGEDQTQDTELVETRPAGDGTFQKWAAVVVPSGEEQRYTCHVQHEGLPKPLTLRWELSSQPTIPIVGIIAGLVLLGAVITGAVVAAVMWRRKSSDRKGGSYTQAASSDSAQGSDVSLTACKGESLEGLMCVGCWVEQWTQLCYGVSLRWMY

SEQ ID NO: 101026 - protein, 248 aa, Homo sapiens
MDSSGWRGVLSSSPPFRLRSAKFSGIALEDLRRALKTRLQMVCVFVMNRMNSQNSGFTQRRRMALGIVILLLVDVIWVASSELTSYVFTQYNKPFFSTFAKTSMFVLYLLGFIIWKPWRQQCTRGLRGKHAAFFADAEGYFAACTTDTTMNSSLSEPLYVPVKFHDLPSEKPESTNIDTEKTPKKSRVRFSNIMEIRQLPSSHALEAKLSRMSYPVKEQESILKTVGKLTATQVAKISFFFCFVVGLL

SEQ ID NO: 101027 - protein, 256 aa, Homo sapiens
MGSGHCLRSTRGSKMVSWSVIAKIQEILQRKMVREFLAEFMSTYVMMVFGLGSVAHMVLNKKYGSYLGVNLGFGFGVTMGVHVAGRISGAHMNAAVTFANCALGRVPWRKFPVYVLGQFLGSFLAAATIYSLFYTAILHFSGGQLMVTGPVATAGIFATYLPDHMTLWRGFLNEAWLTGMLQLCLFAITDQENNPALPGTEALVIGILVVIIGVSLGMNTGYAINPSRDLPPRIFTFIAGWGKQVFRYCPCPGPFL

SEQ ID NO: 101028 - protein, 543 aa, Homo sapiens
MEQSCEEEKEPEPQKNIQETKQVDDEDAELIFVGVEHVNEDAELIFVGVTSNSKPVVSNILNRVTPGSWSRRKKYDHLRKDTARKLQPKSHETVTSEAVTVLPASQLESRSTDSPIIIEPLSKPDYRNSSPQVVPNNSSELPSPLITFTDSLHHPVSTALSVGGINESPRVSKQLSTFEVNSINPKRAKLRDGIIEGNSSASFPSDTFHTMNTQQSTPSNNVHTSLSHVQNGAPFPAAFPKDNIHFKPINTNLDRANELAKTDILSLTSQNKTFDPKKENPIVLLSDFYYGQHKGEGQPEQKTHTTFKCLSCVKVLKNVKFMNHVKHHLEFEKQRNDSWENHTTCQHCHRQFPTPFQLQCHIENVHTAQEPSTVCKICELSFETDQVLLQHMKDHHKPGEMPYVCQVCHYRSSVFADVETHFRTCHENTKNLLCPFCLKIFKTATPYMCHYRGHWGKSAHQCSKCRLQFLTFKEKMEHKTQCHQMFKKPKQLEGLPPETKVTIQVSLEPLQPGSVDVASITVSTSDSEPSLPRSKSKISKKSH

SEQ ID NO: 101029 - protein, 106 aa, Homo sapiens
MSQSRHRAEAPPLEREDSGTFSLGKMITAKPGKTPIQVLHEYGMKTKNIPVYECERSDVQIHVPTFTFRVTVGDITCTGEGTSKKLAKHRAAEAAINILKANASIW

SEQ ID NO: 101030 - protein, 103 aa, Homo sapiens
MADEIAKAQVARPGGDTIFGKIIRKEIPAKIIFEDDRCLAFHDISPQAPTHFLVIPKKHISQISVAEDDDESVITKEKPEKPLGLQLPSCFPKLLHHFVSHQQ

SEQ ID NO: 101031 - protein, 81 aa, Homo sapiens
MYQVPLPLDRDGTLVRLRFTMVALVTVCCPLVAFLFCILWSLLFHFKETTATHCGPSTKMLSLCSLPHPSGTCSSPAFSGG

SEQ ID NO: 101032 - protein, 567 aa, Homo sapiens
MGQPAPYAEGPIQGGDAGELCKCDFLVSISIPQTRSDIPAGARRSSMGPRSLDTCWGRGPERHVHRVSLLLPRLECNGVIFTHRNLCLPGGKTKTENEEKTAQLNISKESESHRLIVEGLLMDVPQHPDFKDRLEKSQLHDTGNKTKIGDCTDLTVQDHESSTTEREEIARKLEESSVSTHLITKQGFAKEQVFYKCGECGSYYNPHSDFHLHQRVHTNEKPYTCKECGKTFRYNSKLSRHQKIHTGEKPYSCEECGQAFSQNSHLLQHQKLHGGQRPYECTDCGKTFSYNSKLIRHQRIHTGEKPFKCKECGKAFSCSYDCIIHERIHNGEKPYECKECGKSLSSNSVLIQHQRIHTGEKPYECKECGKAFHRSSVFLQHQRFHTGEQLYKCNECWKTFSCSSRFIVHQRIHNGEKPYECQECGKTFSQKITLVQHQRVHTGEKPYECKECGKAFRWNASFIQHQKWHTRKKLINGTGLSAVKPYCPCAILSPLPPQHTCSALAPPGPPLSSSHAVVLPPSVPFFLLLPSSEKANPSPVQIAHFFQDLAFPGKSSLQSPNPLSHSL

SEQ ID NO: 101033 - protein, 599 aa, Homo sapiens
MGLLSQGSPLSWEETKRHADHVRRHGILQFLHIYHAVKDRHKDVLKWGDEVEYMLVSFDHENKKVRLVLSGEKVLETLQEKGERTNPNHPTLWRPEYGSYMIEGTPGQPYGGTMSEFNTVEANMRKRRKEATSILEENQALCTITSFPSTLTRNIRHRRGEKVVINVPIFKDKNTPSPFIETFTEDDEASRASKPDHIYMDAMGFGMGNCCLQVTFQACSISEARYLYDQLATICPIVMALSAASPFYRGYVSDIDCRWGVISASVDDRTREERGLEPLKNNNYRISKSRYDSIDSYLSKCGEKYNDIDLTIDKEIYEQLLQEGIDHLLAQHVAHLFIRDPLTLFEEKIHLDDANESDHFENIQSTNWQTMRFKPPPPNSDIGWRVEFRPMEVQLTDFENSAYVVFVVLLTRVILSYKLDFLIPLSKVDENMKVAQKRDAVLQGMFYFRKDICKGGNAVVDGCGKAQNSTELAAEEYTLMSIDTIINGKEGVFPGLIPILNSYLENMEVDVDTRCSILNYLKLIKKRASGELMTVARWMREFIANHPDYKQDSVITDEMNYSLILKCNQIANELCECPELLGSAFRKVKYSGSKTDSSN

SEQ ID NO: 101034 - protein, 243 aa, Homo sapiens
MEPNDSTSTAVEEPDSLEVLVKTLDSQTRTFIVGAQMNVKEFKEHIAASVSIPSEKQRLIYQGRVLQDDKKLQEYNVGGKVIHLVERAPPQTHLPSGASSGTGSASATHGGGSPPGTRGPGASVHDRNANSYVMVGTFNLPSEPRVRLVMAQHMIRDIQTLLSRMECRGGPQPQHSQPPPQPPAVTPEPVALSSQTSEPVESEAPPREPMEAEEVEERAPAQNPELTPGPAPAGPTPAPETNA

SEQ ID NO: 101035 - protein, 542 aa, Homo sapiens
MVSKLSQLQTELLAALLESGLSKEALIQALGEPGPYLLAGEGPLDKGESCGGGRGELAELPNGLGETRGSEDETDDDGEDFTPPILKELENLSPEEAAHQKAVVETLLQEDPWRVAKMVKSYLQQHNIPQREVVDTTGLNQSHLSQHLNKGTPMKTQKRAALYTWYVRKQREVAQQFTHAGQGGLIEEPTGDELPTKKGRRNRFKWGPASQQILFQAYERQKNPSKEERETLVEECNRAECIQRGVSPSQAQGLGSNLVTEVRVYNWFANRRKEEAFRHKLAMDTYSGPPPGPGPGPALPAHSSPGLPPPALSPSKVHGVRYGQPATSETAEVPSSSGGPLVTVSTPLHQVSPTGLEPSHSLLSTEAKLVSAAGGPLPPVSTLTALHSLEQTSPGLNQQPQNLIMASLPGVMTIGPGEPASLGPTFTNTGASTLVIGLASTQAQSVPVINSMGSSLTTLQPVQFSQPLHPSYQQPLMPPVQSHVTQSPFMATMAQLQSPHGERPVPHTAGDDDRGWLSMDAGERGAWQALQSACVSGTSVFP

SEQ ID NO: 101036 - protein, 302 aa, Homo sapiens
MEDSPTMVRVDSPTMVRGENQVSPCQGRRCFPKALGYVTGDMKELANQLKDKPVVLQFIDWILRGISQVVFVNNPVSGILILVGLLVQNPWWALTGWLGTVVSTLMALLLSQDRSLIASGLYGYNATLVGVLMAVFSDKGDYFWWLLLPVCAMSMTCPIFSSALNSMLSKWDLPVFTLPFNMALSMYLSATGHYNPFFPAKLVIPITTAPNISWSDLSALEDSVFQPHLRTSTLDSGVSTALWPALQWEECSWRSPGKPTSWLLAVPCSRPILESAWQTLWLRLDCQLVPGPSVWPRYCSSS

SEQ ID NO: 101037 - protein, 182 aa, Homo sapiens
MRLILFFGALFGHIYCLETFVGDQVLEIVPSNEEQIKNLLQLEAQEHLQLDFWKSPTTPGETAHVRVPFVNVQAVKVFLESQGIAYSIMIEDVQVLLDKENEEMLFNRRRERSGNFNFGAYHTLEEISQEMDNLVAEHPGLVSKVNIGSSFENRPMNVLKKSSGRMQKDDGQLNPKPQRQTP

SEQ ID NO: 101038 - protein, 86 aa, Homo sapiens
MVFYFTSSSVNSSAYTIYMGKDKYENEDLIKHGWPEDIWFHVDKLSSAHVYLRLHKGENIEDIPKEVLMDCAHLVKANSIQGAIHH

SEQ ID NO: 101039 - protein, 272 aa, Homo sapiens
MGPWYGSASPWWPWSRSAVHLSPSSSASSGPCSSTSRRQRPHTVGTEASIGVPGIKMDGGDAQEHGHFLRLPQVPNYLPSVSSAIGGEVPQRYVWRFCIGLHSAPRFLVAFAYWNHYLSCTSPCSCYRPLCRLNFGLNVVENLALLVLTYVSSSEDFTIHENAFIVFIASSLGHMLLTCILWRLTKKHTVSQEDRKSYSWKQRLFIINFISFFSALAVYFRHNMYCEAGVYTIFAILEYTVVLTNMAFHMTAWWDFGNKELLITSQPEEKRF

SEQ ID NO: 101040 - protein, 203 aa, Homo sapiens
MVLGLFSIIFSFSRKCHYASRMLLVSFLLDMAVRAMTSHINICSKLGAELNDFAVFTTFGLASALLLGVDGLLSGILAIIYVSAASFHLCFYSPGVPSTYKGLPCPYASCILASTSLLTKGNRFILCCMASLMILFMMDQSYYPYDKILESENWKKLVYIGGVIMLFFSPLSLSAFYCLMWSLSYIFFPDALWGKAACLSPQH

SEQ ID NO: 101041 - protein, 188 aa, Homo sapiens
MADQIPLYPVRSAAAAAANRKRAAYYSAAGPRPGADRHSRYQLEDESAHLDEMPLMMSEEGFENEESDYHTLPRARIMQRKRGLEWFVCDGWKFLCTSCCGWLINICRRKKELKARTVWLGCPEKCEEKHPRNSIKNQKYNVFTFIPGVLYEQFKFFLNLYFLVISCSQFVPALKIGYLYTYWAPLMT

SEQ ID NO: 101042 - protein, 383 aa, Homo sapiens
MGTFCSVIKFENLQELKRLCHWGPIIALGVIAICSTMAMIDSVLWYWPLHTTGGSVNFIMLINWTVMILYNYFNAMFVGPGFVPLGWKPEISQDTMYLQYCKVCQAYKAPRSHHCRKCNRCVMKMDHHCPWINNCCGYQNHASFTLFLLLAPLGCIHAAFIFVMTMYTQLYHRLSFGWNTVKIDMSAARRDPLPIVPFGLAAFATTLFALGLALGTTIAVGMLFFIQMKIILRNKTSIESWIEEKAKDRIQYYQLDEVFVFPYDMGSRWRNFKQVFTWSGVPEGDGLEWPVREGCHQYSLTIEQLKQKADKRVRSVRYKVIEDYSGACCPLNKGIKTFFTSPCTEEPRIQLQKGEFILATRGLRYWLYGDKILDDSFIEGVLV

SEQ ID NO: 101043 - protein, 363 aa, Homo sapiens
MAAGTAVGAWVLVLSLWGAVVGAQNITARIGEPLVLKCKGAPKKPPQRLEWKLNTGRTEAWKVLSPQGGGPWDSVARVLPNSSLFLPAVGIQDEGIFRCQAMNRNGKETKSNYRVRVYQIPGKPEIVDSASELTAGVPNKVVEESRRSRKRPCEQEVGTCVSEGSYPAGTLSWHLDGKPLVPNEKGVSVKEQTRRHPETGLFTLQSELMVTPARGGDPRPTFSCSFSPGLPRHRALRTAPIQPRVWEPVPLEEVQLVVEPEGGAVAPGGTVTLTCEVPAQPSPQIHWMKDGVPLPLPPSPVLILPEIGPQDQGTYSCVATHSSHGPQESRAVSISIIEPGEEGPTAGEGFDKVREAEDSPQHM

SEQ ID NO: 101044 - protein, 69 aa, Homo sapiens
MMLQLEKKLERELEDDARVIACRFPFPHWTPDHVTGEGIDTVWAYDASTFRGREKRPCTSMHFQLPIQA

SEQ ID NO: 101045 - protein, 128 aa, Homo sapiens
MLRRALLCLAVAALVRADAPEEEDHVLVLRKSNFAEALAAHKYLLVEFYAPWCGHCKALAPEYAKAAGKLKAEGSEIRLAKVDATEESDLAQQYGVRGYPTIKFFRNGDTASPKEYTGVAVALPLNCL

SEQ ID NO: 101046 - protein, 571 aa, Homo sapiens
MAALAPVGSPASRGPRLAAGLRLLPMLGLLQLLAEPGLGRVHHLALKDDVRHKVHLNTFGFFKDGYMVVNVSSLSLNEPEDKDVTIGFSLDRTKNDGFSSYLDEDVNYCILKKQSVSVTLLILDISRSEVRVKSPPEAGTQLPKIIFSRDEKVLGQSQEPNVNPASAGNQTQKTQDGGKSKRSTVDSKAMGEKSFSVHNNGGAVSFQFFFNISTDDQEGLYSLYFHKCLGKELPSDKFTFSLDIEITEKNPDSYLSAGEIPLPKLYISMAFFFFLSGTIWIHILRKRRNDVFKIHWLMAALPFTKSLSLVFHAIDYHYISSQGFPIEGWAVVYYITHLLKGALLFITIALIGTGWAFIKHILSDKDKKIFMIVIPLQVLANVAYIIIESTEEGTTEYGLWKDSLFLVDLLCCGAILFPVVWSIRHLQEASATDGKGDSMGPLQQRANLRAGSRIAAINLAKLKLFRHYYVLIVCYIYFTRIIAFLLKLAVPFQWKWLYQLLDETATLVFFVLTGYKFRPASDNPYLQLSQEEEDLEMESVVTTSGVMESMKKVKKVTNGSVEPQGEWEGAV

SEQ ID NO: 101047 - protein, 207 aa, Homo sapiens
MAEKFDCHYCRDPLQGKKYVQKDGHHCCLKCFDKFCANTCVECRKPIGADSKEVHYKNRFWHDTCFRCAKCLHPLANETFVAKDNKILCNKCTTREDSPKCKGCFKAIVAGDQNVEYKGTVWHKDCFTCSNCKQVIGTGSFFPKGEDFYCVTCHETKFAKHCVKCNKAITSGGITYQDQPWHADCFVCVTCSKKLAGQRFTAVEDQY

SEQ ID NO: 101048 - protein, 424 aa, Homo sapiens
  MOD_RES (361)..(361): Any amino acid
  MOD_RES (368)..(368): Any amino acid
MALPTPSDSTLPAEARGRGRRRRLVWTPSQSEALRACFERNPYPGIATRERLAQAIGIPEPRVQIWFQNERSRQLRQHRRESRPWPGRRGPPEGRRKRTAVTGSQTALLLRAFEKDRFPGIAAREELARETGLPESRIQIWFQNRRARHPGQGGRAPAQAGGLCSAAPGGGHPAPSWVAFAHTGAWGTGLPAPHVPCAPGALPQGAFVSQAARAAPALQPSQAAPAEGISQPAPARGDFAYAAPAPPDGALSHPQAPRWPPHPGKSREDRDPQRDGLPGPCAVAQPGPAQAGPQGQGVLAPPTSQGSPWWGWGRGPQVAGAAWEPQAGAAPPPQPAPPDASASARQGQMQGIPAPSQALQXPAPWSAXPCGLLLDELLASPEFLQQAQPLLETEAPGELEASEEAASLEAPLSEEEYRALLEEL

SEQ ID NO: 101049 - protein, 135 aa, Homo sapiens
MISAHCNLCLLDSSDSCALASQVAGITGVHHHAQLIFVFLIETEFHHVGQAGLELWVQEILPPCLPKCWDYRCEPPRMALNFLFLGIPKFSTFSALEFVNIFVEYHMTVIPECSNLFMIYLGKFTTVLLFAIIWL

SEQ ID NO: 101050 - protein, 153 aa, Homo sapiens
MTTASTSQSYYFDRDDVALKNFAKYFLHQSHEEREHAEKLMKLQNQRGGRIFLQDIKKPDCDDWESGLNAMECALHLEKNVNQSLLELHKLATDKNDPHLCDFIETHYLNEQVKAIKELGDHVTNLRKMGAPESGLAEYLFDKHTLGDSDNES

SEQ ID NO: 101051 - protein, 841 aa, Homo sapiens
MTAVHAGNINFKWDPKSLEIRTLAVERLLEPLVTQVTTLVNTNSKGPSNKKRGRSKKAHVLAASVEQATENFLEKGDKIAKESQFLKEELVAAVEDVRKQGDLMKAAAGEFADDPCSSVKRGNMVRAARALLSAVTRLLILADMADVYKLLVQLKVVEDGILKLRNAGNEQDLGIQYKALKPEVDKLNIMAAKRQQELKDVGHRDQMAAARGILQKNVPILYTASQACLQHPDVAAYKANRDLIYKQLQQAVTGISNAAQATASDDASQHQGGGGGELAYALNNFDKQIIVDPLSFSEERFRPSLEERLESIISGAALMADSSCTRDDRRERIVAECNAVRQALQDLLSEYMGNAGRKERSDALNSAIDKMTKKTRDLRRQLRKAVMDHVSDSFLETNVPLLVLIEAAKNGNEKEVKEYAQVFREHANKLIEVANLACSISNNEEGVKLVRMSASQLEALCPQVINAALALAAKPQSKLAQENMDLFKEQWEKQVRVLTDAVDDITSIDDFLAVSENHILEDVNKCVIALQEKDVDGLDRTAGAIRGRAARVIHVVTSEMDNYEPGVYTEKVLEATKLLSNTVMPRFTEQVEAAVEALSSDPAQPMDENEFIDASRLVYDGIRDIRKAVLMIRTPEELDDSDFETEDFDVRSRTSVQTEDDQLIAGQSARAIMAQLPQEQKAKIAEQVASFQEEKSKLDAEVSKWDDSGNDIIVLAKQMCMIMMEMTDFTRGKGPLKNTSDVISAAKKIAEAGSRMDKLGRTIADHCPDSACKQDLLAYLQRIALYCHQLNICSKVKAEVQNLGGELVVSGNCDTCGALQGLKGWPPPLCWPLTGWTAPCP

SEQ ID NO: 101052 - protein, 277 aa, Homo sapiens
MSEKQMKEAFVSNLNGTTVLEITQGLCFPAFCILCRGFLIIFSQYLCSFSPTWKTRFLTDFVVLIVPMVATLTIWASFILLELLGVIIFGAGLLYQIYRRRTCYARLPFLKILEKFLNISLESEYNPAISCFRVITSAFTAIAILAVDFPLFPRRFAKTELYGTGAMDFGVGGFVFGSAMVCLEVRRRKYMEGSKLHYFTNSLYSVWPLVFLGIGRLAIIKSIGYQEHLTEYGVHWNFFFTIIVVKLITPLLLIIFPLNKSWIIALGITVLYQLALD

SEQ ID NO: 101053 - protein, 67 aa, Homo sapiens
MVGDEQSDPELMQHLGASKRRALGNNFYEYYVDDPPRIVLDKLERRGFRVLSMTGVGQTLVWCLHKE

SEQ ID NO: 101054 - protein, 162 aa, Homo sapiens
MDLFGDLPEPERSPRPAAGKEAQKGPLLFDDLPPASSTDSGSGGPLLFDDLPPASSGDSGSLATSISQMVKTEGKGAKRKTSEEEKNGSEELVEKKVCKASSVIFGLKGYVAERKGEREEMQDAHVILNDITEECRPPSSLMRCNQCRENREEMPFGHFQAY

SEQ ID NO: 101055 - protein, 214 aa, Homo sapiens
SATVLDTHGKQVAFVMSWWTECAVSTGSTYSVLSTMPSDSESSSSLSSVGTTGKAPSPPPLLTDQQVNEKVENLSIQLRLMTRERNELRKRLAFATHGTAFDKRPYHRLNPDYERLKIQCVRAMSDLQSLQNQHTNALKRCEEVAKETDFYHTLHSRLLSDQTRLKDDVDMLRRENGQLLRERNLLQQSWEDMKRLHEEDQKEIGDLRAQQQQS

SEQ ID NO: 101056 - protein, 287 aa, Homo sapiens
MSLMVVSMACVGFFLLQGAWPHEGVHRKPSLLAHPGPLVKSEETVILQCWSDVRFEHFLLHREGKYKDTLHLIGEHHDGVSKANFSIGPMMQDLAGTYRCYGSVTHSPYQLSAPSDPLDIVITGLYEKPSLSAQPGPTVLAGESVTLSCSSRSSYDMYHLSREGEAHERRFSAGPKVNGTFQADFPLGPATHGGTYRCFGSFRDSPYEWSNSSDPLLVSVTGNPRHLHVLIGTSVVKIPFTILLFFLLHRWCSNKKNAAVMDQEPAGNRTVNSEDSDEQDHQEVSYA

SEQ ID NO: 101057 - protein, 327 aa, Homo sapiens
MAPSTAVSVVSDSIKVQPLLISADNKVIIIQPQVQTQPESTAESRPPTEEPSQGAQATKKKKEDRPPTQENPEKIAFMVALGLVTTEHLEEIQSKRQERKRRSTANPAYSGLLETERKRLASNYLNNPLFLTARANEDPCWKNEITHDEHCAACKRGANLQPCGTCPGAYHLSCLEPPLKTAPKGVWVCPRCQQKALKKDEGVPWTGMLAIVHSYVTHKTVKEEEKQKLLQRGSELQNEHQQLEERDRRLASAVQKCLELKTSLLARQRGTQSSLDRLRALLRLIQGEQLLQVTMTTTSPAPLLAGPWTKPSVAATHPTVQHPQGHN

SEQ ID NO: 101058 - protein, 132 aa, Homo sapiens
MATNWGSLLQDKQQLEELARQAVDRALAEGVLLRTSQEPTSSEVVSYAPFTLFPSLVPSALLEQAYAVQMDFNLLVDAVSQNAAFLEQTLSSTIKQDDFTARLFDIHKQVLKEGIAQCSGATDCSREGKKHI

SEQ ID NO: 101059 - protein, 123 aa, Homo sapiens
MADPQSCFMTRQKPGNTFASEGSLNTAGRPGVGKRQVAPVAGVARKGRRIWGSRMIDIQTRMAGRALELLYLPENKPCYLLDIGCGTGLSGSYLSDEGHYWVGLDISPAMLGPGIPSCPAAVP

SEQ ID NO: 101060 - protein, 99 aa, Homo sapiens
MEICADELKKVLNTVVNKHKDLKTHGFTLESCRSMIALMDTDGSGKLNLQEFHHLWNKIKAWQKIFKHYDTDQSGTINSYEMRNAVNDAGHRVAERQGK

SEQ ID NO: 101061 - protein, 194 aa, Homo sapiens
MGRLETADKQSVHIVENEIQASIDQIFSRLERLEILSSKEPPNKRQNARLRVDQLKYDVQHLQTALRNFQHRRHAREQQERQREELLSRTFTTNDSDTTIPMDESLQFNSSLQKVHNGMDDLILDGHNILDGLRTQRLTLKGTQKKILDIANMLGLSNTVMRLIEKRAFQDKYFMIGGMLLTCVVMFLVVQYLT

SEQ ID NO: 101062 - protein, 379 aa, Homo sapiens
MESSPESLQPLEHGVAAGPASGTGSSQEGLQETRLAAGDGPGVWAAETSGGNGLGAAAARRSLPDSASPAGSPEVPGPCSSSAGLDLKDSGLESPAAAEAPLRGQYKVTASPETAVAGVGHELGTAGDAGARPDLAGTCQAELTAAGSEEPSSAGGLSSSCSDPSPPGESPSLDSLESFSNLHSFPSSCEFNSEEGAENRVPEEEEGAAVLPGAVPLCKEEEGEETAQVLAASKERFPGQSVYHIKWIQWKEENTPIITQNENGPCPLLAILNVLLLAWKVKLPPMMEIITAEQLMEYLGDYMLDAKPKEISEIQRLNYEQNMSDAMAILHKLQTGLDVNIDDIVKAVGNCSYNQLVEKIISCKQSDNSELVSEGGLCS

SEQ ID NO: 101063 - protein, 433 aa, Homo sapiens
MVIVEYCKYGNLSNYLKSKRDLFFLNKDAALHMEPKKEKMEPGLEQGKKPRLDSVTSSESFASSGFQEDKSLSDVEEEEDSDGFYKEPITMEDLISYSFQVARGMEFLSSRKCIHRDLAARNILLSENNVVKICDFGLARDIYKNPDYVRKGDTRLPLKWMAPESIFDKIYSTKSDVWSYGVLLWEIFSLGGSPYPGVQMDEDFCSRLREGMRMRAPEYSTPEIYQIMLDCWHRDPKERPRFAELVEKLGDLLQANVQQDGKDYIPINAILTGNSGFTYSTPAFSEDFFKESISAPKFNSGSSDDVRYVNAFKFMSLERIKTFEELLPNATSMFDDYQGDSSTLLASPMLKRFTWTDSKPKASLKIDLRVTSKSKESGLSDVSRPSFCHSSCGHVSEGKRRFTYDHAELERKIACCSPPPDYNSVVLYSTPPI

SEQ ID NO: 101064 - protein, 455 aa, Homo sapiens
MSGSKKKKVTKAERLKLLQEEEERRLKEEEEARLKYEKEEMERLEIQRIEKEKWHRLEAKDLERRNEELEELYLLERCFPEAEKLKQETKLLSQWKHYIQCDGSPDPSVAQEMNTFISLWKEKTNETFEEVIEKSKVVLNLIEKLKFILLETPPCDLQDKNIIQYQESILQLQELLHLKFGVATEILLKQASTLADLDSGNMEKVIKDENVTLYVWANLKKNPRHRSVRFSETQIGFEIPRILATSDIAVRLLHTHYDHVSALHPVSTPSKEYTSAVTELVKDDVKNVEKAISKEVEEESKQQERGSHLIQEEEIKVEEEQGDIEVKMSSAEEESEAIKCEREMKVLSETVSAAQLLLVENSSEKPDFFEDNVVDLCQFTTLGGVYHLDILELPPQCKPVKGWMIVEILKEGLQKYTYPPETTEEFETENAFPPIEVTLEVHENVIFFEDPVVVR

SEQ ID NO: 101065 - protein, 168 aa, Homo sapiens
MRRDRGPKPALGGAGEVEPGGMAASPTGRPRRLQRYLQSGEFDQFRDFPIFESNFVQVTRLGEVANEVTMGVAASSPALELPDLLLLAGPAKENGHLQLFGLFPLKFVQLFVHDKSRCQLEVKLNTSRTFYLQLRAPLKTRDREFGQWVRLLYRLRFLSASAVPFTQE

SEQ ID NO: 101066 - protein, 196 aa, Homo sapiens
MEDLFETFQDEMGFSNMEDDGPEEEERVAEPQANFNTPQALRFEELLANLLNEQHQIAKELFEQLKMKKPSAKQQKEVEKVKPQCKEVHQTLILDPAQRKRLQQQMQQHVQLLTQIHLLATCNPNLNPEASSTRICLKELGTFAQSSIALHHQYNPKFQTLFQPCNLMGAMQLIEDFSTHVSIDCSPHKTVKKTVC

SEQ ID NO: 101067 - protein, 187 aa, Homo sapiens
MEEIYAKFVSQKISKTRWRPLPPGSLQTAETFATGSWDNEENYISLWSIGDFGNLDSDGGFEGDHQLLCDIRHHGDVMDLQFFDQERIVAASSTGCVTVFLHHPNNQTLSVNQQWTTAHYHTGPGSPSYSSAPCTGVVCNNPEIVTVGEDGRINLFRADHKEAVRTIGLVTECHSTVLIDIPTNSML

SEQ ID NO: 101068 - protein, 48 aa, Homo sapiens
MATANSIIVLDDDDEDEAAAQPGPSHPLPNAASPGAEAPSSSEPHGAR

SEQ ID NO: 101069 - protein, 124 aa, Homo sapiens
MIDQAHQEERPIRQILYLGDLLETCHFQAFWQALDENMDLLEGITGFEDSVRKFICHVVGITYQHIDRWLLAEMLGDLSDSQLKVWMSKYGWSADESGQIFICSQEESIKPKNIVEKIDFDSEW

SEQ ID NO: 101070 - protein, 630 aa, Homo sapiens
MIDHLVTMKISHWDGVIRELAARALHNLAQQAPEFSATQVFPRLLSMTLSPDLHMRHGSILACAEVAYALYKLAAQENRPVTDHLDEQAVQGLKQIHQQLYDRQLYRGLGGQLMRQAVCVLIEKLSLSKMPFRGDTVIDGWQWLINDTLRHLHLISSHSRQQMKDAAVSALAALCSEYYMKEPGEADPAIQEELITQYLAELRNPEEMTRCGFSLALGALPGFLLKGRLQQVLTGLRAVTHTSPEDVSFAESRRDGLKAIARICQTVGVKAGAPDEAVCGENVSQIYCALLGCMDDYTTDSRGDVGTWVRKAAMTSLMDLTLLLARSQPELIEAHTCERIMCCVAQQASEKIDRFRAHAASVFLTLLHFDSPPIPHVPHRGELEKLFPRSDVASVNWSAPSQAFPRITQLLGLPTYRYHVLLGLVVSLGGLTESTIRHSTQSLFEYMKGIQSDPQALGSFSGTLLQIFEDNLLNERVSVPLLKTLDHVLTHGCFDIFTTEEDHPFAVKLLALCKKEIKNSKDIQKLLSGIAVFCEMVQFPGDVRRQALLQLCLLLCHRFPLIRKTTASQVYETLLTYSDVVGADVLDEVVTVLSDTAWDAELAVVREQRNRLCDLLGVPRPQLVPQPGAC

SEQ ID NO: 101071 - protein, 1203 aa, Homo sapiens
MTFKTFRPAAMLIERSSDFGKTWGVYRYFAYDCEASFPGISTGPMKKVDDIICDSRYSDIEPSTEGEVIFRALDPAFKIEDPYSPRIQNLLKITNLRIKFVKLHTLGDNLLDSRMEIREKYYYAVYDMVVRGNCFCYGHASECAPVDGFNEEVEGMVHGHCMCRHNTKGLNCELCMDFYHDLPWRPAEGRNSNACKKCNCNEHSISCHFDMAVYLATGNVSGGVCDDCQHNTMGRNCEQCKPFYYQHPERDIRDPNFCERCTCDPAGSQNEGICDSYTDFSTGLIAGQCRCKLNVEGEHCDVCKEGFYDLSSEDPFGCKSCACNPLGTIPGGNPCDSETGHCYCKRLVTGQHCDQCLPEHWGLSNDLDGCRPCDCDLGGALNNSCFAESGQCSCRPHMIGRQCNEVEPGYYFATLDHYLYEAEEANLGPGVSIVERQYIQDRIPSWTGAGFVRVPEGAYLEFFIDNIPYSMEYDILIRYEPQLPDHWEKAVITVQRPGRIPTSSRCGNTIPDDDNQVVSLSPGSRYVVLPRPVCFEKGTNYTVRLELPQYTSSDSDVESPYTLIDSLVLMPYCKSLDIFTVGGSGDGVVTNSAWETFQRYRCLENSRSVVKTPMTDVCRNIIFSISALLHQTGLACECDPQGSLSSVCDPNGGQCQCRPNVVGRTCNRCAPGTFGFGPSGCKPCECHLQGSVNAFCNPVTGQCHCFQGVYARQCDRCLPGHWGFPSCQPCQCNGHADDCDPVTGECLNCQDYTMGHNCERCLAGYYGDPIIGSGDHCRPCPCPDGPDSGRQFARSCYQDPVTLQLACVCDPGYIGSRCDDCASGYFGNPSEVGGSCQPCQCHNNIDTTDPEACDKETGRCLKCLYHTEGEHCQFCRFGYYGDALQQDCRKCVCNYLGTVQEHCNGSDCQCDKATGQCLCLPNVIGQNCDRCAPNTWQLASGTGCDPCNCNAAHSFGPSCNEFTGQCQCMPGFGGRTCSECQELFWGDPDVECRACDCDPRGIETPQCDQSTGQCVCVEGVEGPRCDKCTRGYSGVFPDCTPCHQCFALWDVIIAELTNRTHRFLEKAKALKISGVIGPYRETVDSVERKVSEIKDILAQSPAAEPLKNIGNLFEEAEKLIKDVTEMMAQVEVKLSDTTSQSNSTAKELDSLQTEAESLDNTVKELAEQLEFIKNSDIREMGSCYAAQAGLELLDSSDPPVSDF

SEQ ID NO: 101072 - protein, 1093 aa, Homo sapiens
MGGKAWPRRAVGTAGGPCAEQISAPFQTLLMPHLPLASFRPPFWGLRHSRGLPRFHSVSTQSEPHGSPISRRNREAKQKRLREKQATLEAEIAGESKSPAESIKAWRPKELVLYEIPTKPGEKKDVSGPLPPAYSPRYVEAAWYPWWVREGFFKPEYQARLPQATGETFSMCIPPPNVTGSLHIGHALTVAIQDALVRWHRMRGDQVLWVPGSDHAGIATQAVVEKQLWKERGVRRHELSREAFLREVWQWKEAKGGEICEQLRALGASLDWDRECFTMDVGSSVAVTEAFVRLYKAGLLYRNHQLVNWSCALRSAISDIEVENRPLPGHTQLRLPGCPTPVSFGLLFSVAFPVDGEPDAEVVVGTTRPETLPGDVAVAVHPDDSRYTHLHGRQLRHPLMGQPLPLITDYAVQPHVGTGAVKVTPAHSPADAEMGARHGLSPLNVIAEDGTMTSLCGDWLQGLHRFVAREKIMSVLSEWGLFRGLQNHPMVLPICSRSGDVIEYLLKNQWFVRCQEMGARAAKAVESGALELSPSFHQKNWQHWFSHIGDWCVSRQLWWGHQIPAYLVVEDHAQGEEDCWVVGRSEAEAREVAAELTGRPGAELTLERDPDVLDTWFSSALFPFSALGWPQETPDLARFYPLSLLETGSDLLLFWVGRMVMLGTQLTGQLPFSKVLLHPMVRDRQGRKMSKSLGNVLDPRDIISGVEMQVLQEKLRSGNLDPAELAIVAAAQKKDFPHGIPECGTDALRFTLCSHGVQAGDLHLSVSEVQSCRHFCNKIWNALRFILNALGEKFVPQPAEELSPSSPMDAWILSRLALAAQECERGFLTRELSLVTHALHHFWLHNLCDVYLEAVKPVLWHSPRPLGPPQVLFSCADLGLRLLAPLMPFLAEELWQRLPPRPGCPPAPSISVAPYPSACSLEHWRQPELERRFSRVQEVVQVLRALRATYQLTKARPRVLLQSSEPGDQGLFEAFLEPLGTLGYCGAVGLLPPGAAAPSGWAQAPLSDTAQVYMELQGLVDPQIQLPLLAARRYKLQKQLDSLTARTPSEGEAGTQRQQKLSSLQLELSKLDKAASHLQQLMDEPPAPGSPEL

SEQ ID NO: 101073 - protein, 49 aa, Homo sapiens
MELEAMSRYTSPVNPAVFPHLTVVLLAIGMFFTAWFFVYPFTEQPEDQH

SEQ ID NO: 101074 - protein, 775 aa, Homo sapiens
MAQWNQLQQLDTRYLEQLHQLYSDSFPMELRQFLAPWIESQDWAYAASKESHATLVFHNLLGEIDQQYSRFLQESNVLYQHNLRRIKQFLQSRYLEKPMEIARIVARCLWEESRLLQTAATAAQQGGQANHPTAAVVTEKQQMLEQHLQDVRKRVQDLEQKMKVVENLQDDFDFNYKTLKSQGDMQDLNGNNQSVTRQKMQQLEQMLTALDQMRRSIVSELAGLLSAMEYVQKTLTDEELADWKRRQQIACIGGPPNICLDRLENWITSLAESQLQTRQQIKKLEELQQKVSYKGDPIVQHRPMLEERIVELFRNLMKSAFVVERQPCMPMHPDRPLVIKTGVQFTTKVRLLVKFPELNYQLKIKVCIDNLCSYRDSGDVAALRGSRKFNILGTNTKVMNMEESNNGSLSAEFKHLTLREQRCGNGGRANCDASLIVTEELHLITFETEVYHQGLKIDLETHSLPVVVISNICQMPNAWASILWYNMLTNNPKNVNFFTKPPIGTWDQVAEVLSWQFSSTTKRGLSIEQLTTLAEKLLGPGVNYSGCQITWAKFCKENMAGKGFSFWVWLDNIIDLVKKYILALWNEGYIMGFISKERERAILSTKPPGTFLLRFSESSKEGGVTFTWVEKDISGKTQIQSVEPYTKQQLNNMSFAEIIMGYKIMDATNILVSPLVYLYPDIPKEEAFGKYCRPESQEHPEADPGSAAPYLKTKFICVTPTTCSNTIDLPMSPRTLDSLMQFGNNGEGAEPSAGGQFESLTFDMELTSECATSPM

SEQ ID NO: 101075 - protein, 194 aa, Homo sapiens
MASLGANPRRTPQGPRPGAASSGFPSPAPVPGPREAEEEEVEEEEELAEIHLCVLWNSGYLGIAYYDTSDSTIHFMPDAPDHESLKLLQRVLDEINPQSVVTSAKQDENMTRFLGKLASQEHREPKRPEIIFLPSVDFGLEISKQRLLSGNYSFIPDAMTATEKILFLSSIIPFDCLLTVRALGGLLKFLGRRR

SEQ ID NO: 101076 - protein, 490 aa, Homo sapiens
MAEAVFHAPKRKRRVYETYESPLPIPFGQDHGPLKEFKIFRAEMINNNVIVRNAEDIEQLYGKGYFGKGILSRSRPSFTISDPKLVAKWKDMKTNMPIITSKRYQHSVEWAAELMRRQGQDESTVRRILKDYTKPLEHPPVKRNEEAQVHDKLNSGMVSNMEGTAGGERPSVVNGDSGKSGGVGDPREPLGCLQEGSGCHPTTESFEKSVREDASPLPHVCCCKQDALILQRGLHHEDGSQHIGLLHPGDRGPDHEYVLVEEAECAMSEREAAPNEEAFFLVYALGCLSIYYEKEPLTIVKLWKAFTVVQPTFRTTYMAYHYFRSKGWVPKVGLKYGTDLLLYRKGPPFYHASYSVIIELVDDHFEGSLRRPLSWKSLAALSRVSVNVSKELMLCYLIKPSTMTDKEMESPECMKRIKVQSRSVVQAGVQCCDLGSLQPLPAGFKRFSCLSLLSSWDYRHAPPHTANFCIFSRDGVSLCWPGWSGTPDLK

SEQ ID NO: 101077 - protein, 714 aa, Homo sapiens
MRKKRGREDESYNISEVMSKEEILSVAKKNKKENEDENSSSTNLCVEDLQKNKDSNSIIKDRLSETVRQNTKFFFDPVRKCNGQPVPFQQPKHFTGGVMRWYQVEGMEWLRMLWENGINGILADEMGLGKTVQCIATIALMIQRGVPGPFLVCGPLSTLPNWMAEFKRFTPDIPTMLYHGTQEERQKLVRNIYKRKGTLQIHPVVITSFEIAMRDRNALQHCYWKYLIVDEGHRIKNMKCRLIRELKRFNADNKLLLTGTPLQNNLSELWSLLNFLLPDVFDDLKSFESWFDITSLSETAEDIIAKEREQNVLHMLHQILTPFLLRRLKSDVALEVPPKREVVVYAPLSKKQEIFYTAIVNRTIANMFGSSEKETIELSPTGRPKRRTRKSINYSKIDDFPNELEKLISQIQPEVDRERAVVEVNIPVESEVNLKLQNIMMLLRKCCNHPYLIEYPIDPVTQEFKIDEELVTNSGKFLILDRMLPELKKRGHKVLLFSQMTSMLDILMDYCHLRDFNFSRLDGSMSYSEREKNMHSFNTDPEVFIFLVSTRAGGLGINLTAADTVIIYDSDWNPQSDLQAQDRCHRIGQTKPVVVYRLVTANTIDQKIVERAAAKRKLEKLIIHKNHFKGGQSGLNLSKNFLDPKELMELLKSRDYEREIKGSREKVISDKDLELLLDRSDLIDQMNASGPIKEKMGIFKILENSEDSSPECLF

SEQ ID NO: 101078 - protein, 10 aa, Homo sapiens
  MOD_RES (1)..(1): Any amino acid
XRPAKRRRKR

SEQ ID NO: 101079 - protein, 449 aa, Homo sapiens
MESSGSQGGRAPSYDQPDYGQQDSYDQQSGYDQHQGSYDEQSNYDQQHDSYSQNQQSYHSQRENYSHHTQDDRRDVSRYGEDNRGYGGSQGGGRGRGGYDKDGRGPMTGSSGGDRGGFKNFGGHRDYGPRTDADSESDNSDNNTIFVQGLGEGVSTDQVGEFFKQIGIIKTNKKTGKPMINLYTDKDTGKPKGEATVSFDDPPSAKAAIDWFDGKEFHGNIIKVSFATRRPEFMRGGGSGGGRRGRGGYRGRGGFQGRGGDPKSGDWVCPNPSCGNMNFARRNSCNQCNEPRPEDSRPSGGDFRGRGYGGERGYRGRGGRGGDRGGYGGDRTGGAMEETVVVAVATVETEVEAMEETGVVAAMEETEVGATEETEVAMEAKWEEETTTEMISATDHTDDCFECSFVSDMIHSEIARVLPAAFLVASSWVVKLSDIWIFIWVGGLGQFFF

SEQ ID NO: 101080 - protein, 131 aa, Homo sapiens
MSAEVPEAASAEEQKSEHNMLPWSLQPSIPNSLEEMEDKVTSPEKAEEAKLKARYPHLGQKPGGSDFLRKRLQKGQKYFDSGDYNMAKAKMKNKQLPTAAPDKTEVTGDHIPTPQDLPQRKPSLVASKLAG

SEQ ID NO: 101081 - protein, 310 aa, Homo sapiens
MLKNKGHSSKKDNLAVNAVALQDHILHDLQLRNLSVADHSKTQVQKKENKSLKRDTKAIIDTGLKKTTQCPKLEDSEKEYVLDPKPPPLTLAQKLGLIGPPPPPLSSDEWEKVKQRSLLQGDSVQPCPICKEEFELRPQVLLSCSHVFHKACLQAFEKFTNKKTCPLCRKNQYQTRVIHDGARLFRIKCVTRIQAYWRGCVVRKWYRNLRKTVPPTDAKLRKKFFEKKFTEISHRILCSYNTNIEELFAEIDQCLAINRSVLQQLEEKCGHEITEEEWEKIQVQNETSACFEDPCLGAHGSHFSLSNFLL

SEQ ID NO: 101082 - protein, 269 aa, Homo sapiens
MEPWPLLLLFSLCSAGLVLGSEHETRLVAKLFKDYSSVVRPVEDHRQVVEVTVGLQLIQLINVDEVNQIVTTNVRLKQQWVDYNLKWNPDDYGGVKKIHIPSEKIWRPDLVLYNNADGDFAIVKFTKVLLQYTGHITWTPPAIFKSYCEIIVTHFPFDEQNCSMKLGTWTYDGSVVAINPESDQPDLSNFMESGEWVIKESRGWKHSVTYSCCPDTPYLDITYHFVMQRLPLYFIVNVIIPCLLFSFLTGLVFYLPTDSGGCGCHDCCC

SEQ ID NO: 101083 - protein, 245 aa, Homo sapiens
MQFGTRTTTAEPGFMGTWQNADTNLLFRMSQQAIRCTLVNCTCECFQPGKINLRTCDQCKHGWVAHALDKLSTQHLYHPTQVEIVQSNVVFDISSLMLYGTQAVPVRLKILLDRLFSVLKQEEVLHILHGLGWTLRDYVRGYILQDAAGKVLDRWAIMSREEEIITLQQFLRFGETKSIVELMAIQEKEGQAVAVPSSKTDSDIRTFIESNNRTRSPSLLAHLENSNPSSIHHFENIPNSLAFLL

SEQ ID NO: 101084 - protein, 1505 aa, Homo sapiens [sequence omitted]

SEQ ID NO: 101085 - protein, 49 aa, Homo sapiens
MIGDILLFGTLLMNAGAVLNFKLKKKDTQGFGEESREPSTGCSALESQR

SEQ ID NO: 101086 - protein, 247 aa, Homo sapiens
MAILVGTDQDFYSLLGVSKTASSREIRQAFKKLALKLHPDKNPNNPNAHGDFLKINRAYEVLKDEDLRKKYDKYGEKGLEDNQGGQYESWNYYRYDFGIYDDDPEIITLERREFDAAVNSGELWFVNFYSPGCSHCHDLAPTWRDFAKEVDGLLRIGAVNCGDDRMLCRMKGVNSYPSLFIFRSGMAPVKYHGDRSKESLVSFAMQHVRSTVTELWTGNFVNSIQTAFAAGIGWLITFCSKGGGWSC

SEQ ID NO: 101087 - protein, 127 aa, Homo sapiens
MSTRNCQGMDSVIKPLDTIPEDKKVRVQRTQSTFDPFEKPANQVKRVHSENNACINFKTSSTGKESPKVRRHSSPSSPTSPKFGKADSYEKLEKLGEGSYATVYKGKSKVNGKLVALKVIRLQEEEG

SEQ ID NO: 101088 - protein, 106 aa, Homo sapiens
  MOD_RES (1)..(1): Any amino acid
XVEGWILFVTGVHEEATEEDIHDKFAEYGEIKNIHLNLDRRTGYLKGYTLVEYETYKEAQAAMEGLNGQDLMGQPISVDWCFVRGPPKGKRRGGRRRSRSPDRRRR

SEQ ID NO: 101089 - protein, 345 aa, Homo sapiens
MELESKLNEAKEEFTSGGPLGQKRDPKEWIPRPPEKYALSGHRSPVTRVIFHPVFSVMVSASEDATIKVWDYETGDFERTLKGHTDSVQDISFDHSGKLLASCSADMTIKLWDFQGFECIRTMHGHDHNVSSVAIMPNGDHIVSASRDKTIKMWEVQTGYCVKTFTGHREWVRMVRPNQDGTLIASCSNDQTVRVWVVATKECKAELREHEHVVECISWAPESSYSSISEATGSETKKSGKPGPFLLSGSRDKTIKMWDVSTGMCLMTLVGHDNWVRGVLFHSGGKFILSCADDKTLRVWDYKNKRCMKTLNAHEHFVTSLDFHKTAPYVVTGSVDQTVKVWECR

SEQ ID NO: 101090 - protein, 462 aa, Homo sapiens
MTSPVLVDIREEVTCPICLELLTEPLSIDCGHSFCQACITPNGRESVIGQEGERSCPVCQTSYQPGNLRPNRHLANIVRRLREEDGKVICWLCERSQEHRGHHTFLVEEVAQEYQEKFQESLKKLKNEEQEAEKLTAFIREKKTSWKNQMEPERCRIQTEFNQLRNILDRVEQRELKKLEQEEKKGLRIIEEAENDLVHQTQSLRELISDLERRCQGSTMELLQDVSDVTERSEFWTLRKPEALPTKLRSMFRAPDLKRMLRVCRELTDVQSYWVDVTLNPHTANLNLVLAKNRRQVRFVGAKVSGPSCLEKHYDCSVLGSQHFSSGKHYWEVDVAKKTAWILGVCSNSLGPTFSFNHFAQNHSAYSRYQPQSGYWVIGLQHNHEYRAYEDSSPSLLLSMTVPPRRVGVFLDYEAGTVSFYNVTNHGFPIYTFSKYYFPTTLCPYFNPCNCVIPMTLRRPSS

SEQ ID NO: 101091 - protein, 267 aa, Homo sapiens
MAAYKGHHYPGPGNHFWKCLFMSGLSEVQLNHMDDHTLPGKYGIGFTNMVERTTPGSKDLSSKEFREGGRILVQKLQKYQPRIAVFNGKCIYEIFSKEVFGVKVKNLEFGLQPHKIPDTETLCYVMPSSSARCAQFPRAQDKVHYYIKLKDLRDQLKGIERNMDVQEVQYTFDLQLAQEDAKKMAVKEEKYDPGYEAAYGGAYGENPCSSEPCGFSSNGLIESVELRGESAFSGIPNGQWMTQSFTDQIPSFSNHCGTQEQEEESHA

SEQ ID NO: 101092 - protein, 56 aa, Homo sapiens
MECPHLSSSVCIAPDSAKFPNGSPSSWCCSAFKCLSGVTVLCPQRVLYVAQAGLEL

SEQ ID NO: 101093 - protein, 47 aa, Homo sapiens
MRTKAAGCAERRPLQPRTEAAAAPAGRGTVKTVVCKAETPACMESAF

SEQ ID NO: 101094 - protein, 125 aa, Homo sapiens
ENLFSDLQDGRRLLDLLEGLTGQKLPKEKGSTRVHALNNVNKALRVLQNNNVDLVNIGSTDIVDGNHKLTLGLIWNIILHWQVLGDRWANICRWTEDRWVLLQDILLKWQRLTEEQCLFSAWLSE

SEQ ID NO: 101095 - protein, 257 aa, Homo sapiens
MGRGWGFLFGLLGAVWLLSSGHGEEQPPETAAQRCFCQVSGYLDDCTCDVETIDRFNNYRLFPRLQKLLESDYFRYYKVNLKRPCPFWNDISQCGRRDCAVKPCQSDEVPDGIKSASYKYSEEANNLIEECEQAERLGAVDESLSEETQKAVLQWTKHDDSSDNFCEADDIQSPEAEYVDLLLNPERYTGYKGPDAWKIWNVIYEENCFKPQTIKRPLNPLASGQGKLLICVSLLFLRSLCRKKSILQTYIWPTCKH

SEQ ID NO: 101096 - protein, 484 aa, Homo sapiens
MSRSTQELLGYHCRLQDKLQEQEGSLAAEGRHSLASAADHMKVVPSLLLSVLLAQVWLVPGLAPSPQSPETPAPQNQTSRVVQAPKEEEEDEQEASEEKASEEEKAWLMASRQQLAKETSNFGFSLLRKISMRHDGNMVFSPFGMSLAMTGLMLGATGPTETQIKRGLHLQALKPTKPGLLPSLFKGLRETLSRNLELGLTQGSFAFIHKDFDVKETFFNLSKRYFDTECVPMNFRNASQAKRLMNHYINKETRGKIPKLFDEINPETKLILVDYILFKGKWLTPFDPVFTEVDTFHLDKYKTIKVPMMYGAGKFASTFDKNFRCHVLKLPYQGNATMLVVLMEKMGDHLALEDYLTTDLVETWLRNMKTRNMEVFFPKFKLDQKYEMHELLRQMGIRRIFSPFADLSELSATGRNLQVSRVLQRTVIEVDERGTEAVAGILSEITAYSMPPVIKVDRPFHFMIYEETSGMLLFLGRVVNPTLL

SEQ ID NO: 101097 - protein, 152 aa, Homo sapiens
MAGAEGAAGRQSELEPVVSLVDVLEEDEELENEACAVLGGSDSEKCSYSQIPDEMIQCVVCEDWFHGRHLGAIPPESGDFQEMVCQACMKRCSFLWAYAAQLAVTKISTEDDGLVRNIDGIGDQEVIKPENGEHQDSTLKEDVPEQGKDDVR

SEQ ID NO: 101098 - protein, 920 aa, Homo sapiens
MGKKRTTSGEGRERQRLPARRFRTTSPAALRADSVDGGSLLAPLLGLTDRAFSDCPDLADGAMEKMSRVTTALGGSVLTGRTMHCHLDAPANAISVCRDAAQVVVAGRSIFKIYAIEEEQFVEKLNLRVGRKPSLNLSCADVVWHQMDENLLATAATNGVVVTWNLGRPSRNKQDQLFTEHKRTVNKVCFHPTEAHVLLSGSQDGFMKCFDLRRKDSVSTFSGEATEAGPREWAMAGCVPILPVLSCRILRLHHSFAHGPMQDAESTANDARESWGCPLYPLGLCSGPQAGQSESVRDVQFSIRDYFTFASTFENGNVQLWDIRRPDRCERMFTAHNGPVFCCDWHPEDRGWLATGGRDKMVKVWDMTTHRAKEMHCVQTIASVARVKWRPECRHHLATCSMMVDHNIYVWDVRRPFVPAAMFEEHRDVTTGIAWRHPHDPSFLLSGSKDSSLCQHLFRDASQPVERANPEGLCYGLFGDLAFAAKESLVAAESGRKPYTGDRRHPIFFKRKLDPAEPFAGLASSALSVFETEPGGGGMRWFVDTAERYALAGRPLAELCDHNAKVARELGRNQVAQTWTMLRIIYCSPGLVPTANLNHSVGKGGSCGLPLMNSFNLKDMAPGLGSETRLDRSKGDARSDTVLLDSSATLITNEDNEETEGSDVPADYLLGDVEGEEDELYLLDPEHAHPEDPECVLPQEAFPLRHEIVDTPPGPEHLQDKADSPHVSGSEADVASLAPVDSSFSLLSVSHALYDSRLPPDFFGVLVRDMLHFYAEQGDVQMAVSVLIVLGERVRKDIDEQTQEHWYTSYIDLLQRFRLWNVSNEVVKLSTSRAVSCLNQASTTLHVNCSHCKRPMSSRGWVCDRCHRCASMCAVCHHVVKGLFVWCQGCSHGGHLQHIMKWLEGSSHCPAGCGHLCEYS

SEQ ID NO: 101099 - protein, 101 aa, Homo sapiens
MEAMWLLCVALAVLAWGFLWVWDSSERMKSREQGGRLGAESRTLLVIAHPDDEAMFFAPTVLGLARLRHWVYLLCFSAGISQMTQACSGTQSTWPESSFST

SEQ ID NO: 101100 - protein, 95 aa, Homo sapiens
MRLPRKSLEVATSEDYKLLENMNKLTSLKYLEMKDIAINISRNLKDLNQKYAGLQPYLDQINVIEEQVAALEQAAYKLDAYSKKLEAKYKKLEKR

SEQ ID NO: 101101 - protein, 531 aa, Homo sapiens
MDYTVSMFLNTLTPKFYVALTGTSSLISGLILIFEWWYFRKYGTSFIEQVSVSHLRPLLGGVDNNSSNNSNSSNGDSDSNRQSVSECKVWRNPLNLFRGAEYNRYTWVTGREPLTYYDMNLSAQDHQTFFTCDSDHLRPADAIMQKAWRERNPQARISAAHEALEINEIRSRVEVPLIASSTIWEIKLLPKCATAYILLAEEEATTIAEAEKLFKQALKAGDGCYRRSQQLQHHGSQYEAQHRRDTNVLVYIKRRLAMCARRLGRTREAVKMMRDLMKEFPLLSMFNIHENLLEALLELQAYADVQAVLAKYDDISLPKSATICYTAALLKARAVSDKFSPEAASRRGLSTAEMNAVEAIHRAVEFNPHVPKYLLEMKSLILPPEHILKRGDSEAIAYAFFHLAHWKRVEGALNLLHCTWEGTFRMIPYPLEKGHLFYPYPICTETADRELLPSFHEVSVYPKKELPFFILFTAGLCSFTAMLALLTHQFPELMGVFAKAFLSTLFAPLNFVMEKVESILPSSLWHQLTRI

SEQ ID NO: 101102 - protein, 59 aa, Homo sapiens
MVKAEPDVKKLEDQLQGGQLEEVILQAEHELNLARKMREWKLWEPLVEEPPADQWKWPI

SEQ ID NO: 101103 - protein, 119 aa, Homo sapiens
MDMGNPGTLSPTKPGSQYYQYSSNNPRRRPLHSSAMEVQTKKVRKVPPGLPSSVYAPSASTADYNRDSPGYPSSKPATSTFPSSFFMQDGHHSSDPWSSSSGMNQPGYAGMLGNSSHIP

SEQ ID NO: 101104 - protein, 65 aa, Homo sapiens
MGASGSKARGLWPFASAAGGGGSEAAGAEQALVRPRGRAVPPFVFTRRGLLLFQSLTLGQQHLLE

SEQ ID NO: 101105 - protein, 85 aa, Homo sapiens
MPMILGYWDIRGLAHAIRLLLEYTDSSYEEKKYTMGDAPDYDRSQWLNEKFKLGLDFPNVGRQKRRRFVWTFWRTRPWTTICSWA

SEQ ID NO: 101106 - protein, 382 aa, Homo sapiens
MATLFYGLIDQTREFLHAAETPVPSVGEYLKKEIGQHVAGWTEDEETRKLKLAVLNSFFNLECCVSGTHSMDLVALAPFGEYTVLPGLDCTFSKGYQGLTNCMMAALPEDTVVFEKPVKTIHWNGSFQEAAFPGETFPVSVECEDGDRFPAHHVIVTVPLGFLREHLDTFFDPPLPAEKAEAIRKIGFGTNNKIFLEFEEPFWEPDCQLIQLVWEDTSPLEDAAPELQDAWFRKLIGFVVLPAFASVHVLCGFIAGLESEFMETLSDEEVLLCLTQVLRRVTGNPRLPAPKSVLRSRWHSAPYTRGSYSYVAVGSTGGDLDLLAQPLPADGAGAQLQILFAGEATHRTFYSTTHGALLSGWREADRLLSLWAPQVQQPRPRL

SEQ ID NO: 101107 - protein, 98 aa, Homo sapiens
MEEQPQMQDADEPADSGGEGRAGGPPQVAGAQAACSEDRMTLLLRLRAQTKQQLLEYKSMVDASEEKTPEQIMQEKQIEAKIEDLENEIEEDETFNCT

SEQ ID NO: 101108 - protein, 282 aa, Homo sapiens
MSFRKVVRQSKFRHVFGQPVKNDQCYEDIRVSRVTWDSTFCAVNPKFLAVIVEASGGGAFLVLPLSKTGRIDKAYPTVCGHTGPVLDIDWCPHNDEVIASGSEDCTVMVWQIPENGLTSPLTEPVVVLEGHTKRVGIIAWHPTARNVLLSAGCDNVVLIWNVGTAEELYRLDSLHPDLIYNVSWNHNGSLFCSACKDKSVRIIDPRRGTLVAEREKAHEGARPMRAIFLADGKVFTTGFSRMSERQLALWDPGSPLLQKASSSSKPPGPSPLCFCIVTSRAP

SEQ ID NO: 101109 - protein, 149 aa, Homo sapiens
MPTTTALRWTAAARVRRKGRGGWVPAALRSVSQDGVPGCTVMGGETRSPENAVDFTGRCYFTKICKCKLKDIACLKCGNIVGYHVIVPCSSCLLSCNNGHFWMFHSQAVYDINRLDSTGVNVLLWGNLPEIEESTDEDVLNISAEECIR

SEQ ID NO: 101110 - protein, 297 aa, Homo sapiens
MGVKKKKEMQVAALTICHQDLETLKSFADVEGKNLASLLLHCVQLTDGVSQIHYIKQIVPLLEKADKNGMCDPTIQSCLDILAGIYLSLSLKNPLKKVLASSLNSLPDFFLPEAMHRFTSRLQEELNTTDLYSYRKVTDNISSCMENFNLGRASVNNLLKNVLHFLQKSLIEILEENRKCAGNHIIQTQLMNDLLVGIRVSMMLVQKVQDFQGNLWKTSDSPIWQNMCGLLSIFTKVLSDDDLLQTVQSTSGLAIILFIKTMFHPSEKIPHLCAASFSGLHQCPRVVYEQLQEPLLW

SEQ ID NO: 101111 - protein, 97 aa, Homo sapiens
MGLELYLDLLSQPCRAVYIFAKKNDIPFELRIVDLIKGQHLSDAFAQVNPLKKVPALKDGDFTLTERTCRPVPVWMSTWHGSTRLCGEAASGPCGIR

SEQ ID NO: 101112 - protein, 59 aa, Homo sapiens
MAFTQLTFRDVAIEFSQDEWKCLNSTQRTLYRDVMLENYRNLVSLDPSVIASLLIQAKG

SEQ ID NO: 101113 - protein, 143 aa, Homo sapiens
MASVAAARAVPVGSGLRGLQRTLPLVVILGATGTGKSTLALQLGQRLGGEIVSADSMQVYEGLDIITNKVSAQEQRICRHHMISFVDPLVTNYTVVDFRNRATALIEDIFARDKIPIVVGGTNYYIESLLWKVLVNTKELASF

SEQ ID NO: 101114 - protein, 164 aa, Homo sapiens
SPRSQTLIRPQKDCACACVCVCTIIKEGMLTKQNNSFQRSKRRYFKLRGRTLYYAKTAKSIIFDEVDLTDASVAESSTKNVNNSFTVITPCRKLILCADNRKEMEDWIAALKTVQNREHFEPTQYSMDHFSGMHNWYACSHARPTYCNVCREALSGVTSHGLSC

SEQ ID NO: 101115 - protein, 1213 aa, Homo sapiens
MVCTQKSKKTEFKTLEGVITRTKHGEKVSLSSKCAEIDREMISSLGVSKAVLNNVIFCHQEDSNWPLSEGKALKQKFDEIFSATRYIKALETLRQVRQTQGQKVKEYQMELKYLKQYKEKACEIRDQITSKEAQLTSSKEIVKSYENELDPLKNRLKEIEHNLSKIMKLDNEIKALDSRKKQMEKDNSELEEKMEKVFQGTDEQLNDLYHNHQRTVREKERKLVDCHRELEKLNKESRLLNQEKSELLVEQGRLQLQADRHQEHIRARDSLIQSLATQLELDGFERGPFSERQIKNFHKLVRERQEGEAKTANQLMNDFAEKETLKQKQIDEIRDKKTGLGRIIELKSEILSKKQNELKNVKYELQQLEGSSDRILELDQELIKAERELSKAEKNSNVETLKMEVISLQNEKADLDRTLRKLDQEMEQLNHHTTTRTQMEMLTKDKADKDEQIRKIKSRHSDELTSLLGYFPNKKQLEDWLHSKSKEINQTRDRLAKLNKELASSEQNKNHINNELKRKEEQLSSYEDKLFDVCGSQDFESDLDRLKEEIEKSSKQRAMLAGATAVYSQFITQLTDENQSCCPVCQRVFQTEAELQEVISDLQSKLRLAPDKLKSTESELKKKEKRRDEMLGLVPMRQSIIDLKEKEIPELRNKLQNVNRDIQRLKNDIEEQETLLGTIMPEEESAKVCLTDVTIMERFQMELKDVERKIAQQAAKLQGIDLDRTVQQVNQEKQEKQHKLDTVSSKIELNRKLIQDQQEQIQHLKSTTNELKSEKLQISTNLQRRQQLEEQTVELSTEVQSLYREIKDAKEQVSPLETTLEKFQQEKEELINKKNTSNKIAQDKLNDIKEKVKNIHGYMKDIENYIQDGKDDYKKQKETELNKVIAQLSECEKHKEKINEDMRLMRQDIDTQKIQERWLQDNLTLRKRNEELKEVEEERKQHLKEMGQMQVLQMKSEHQKLEENIDNIKRNHNLALGRQKGYEEEIIHFKKELREPQFRDAEEKYREMMIVMRTTELVNKDLDIYYKTLDQAIMKFHSMKMEEINKIIRDLWRSTYRGQDIEYIEIRSDADENVSASDKRRNYNYRVVMLKGDTALDMRGRCSAGQKVLASLIIRLALAETFCLNCGIIALDEPTTNLDRENIESLAHALVEIIKSRSQQRNFQLLVITHDEDFVELLGRSEYVEKFYRIKKNIDQCSEIVKCSVSSLGFNVH

SEQ ID NO: 101116 - protein, 201 aa, Homo sapiens
MEESEPERKRARTDEVPAGGSRSEAEDEDDEDYVPYVPLRQRRQLLLQKLLQRRRKGAAEEEQQDSGSEPRGDEDDIPLGPQSNVSLLDQHQHLKEKAEARKESAKEKQLKEEEKILESVAEGRALMSVKEMAKGITYDDPIKTSWTPPRYVLSMSEERHERVRKKYHILVEGDGIPPPIKSFKEMKFPAGVVPVLQALGL

SEQ ID NO: 101117 - protein, 140 aa, Homo sapiens
MAAAMPLALLVLLLLGPGGWCLAEPPRDSLREELVITPLPSGDVAATFQFRTRWDSELQREGVSHYRLFPKALGQLISKYSLRELHLSFTQGFWRTRYWGPPFLQAPSGAELWVWFQDTVTEFSSQLWTLKEGAEVAPGQ

SEQ ID NO: 101118 - protein, 424 aa, Homo sapiens
MPMLLPHPHQHFLKGLLRAPFRCYHFIFHSSTHLGSGIPCAQPFNSLGLHCTKWMLLSDGLKRKLCVQTTLKDHTEGLSDKEQRFVDKLYTGLIQGQRACLAEAITLVESTHSRKKELAQVLLQKVLLYHREQEQSNKGKPLAFRVGLSGPPGAGKSTFIEYFGKMLTERGHKLSVLAVDPSSCTSGGSLLGDKTRMTELSRDMNAYIRPSPTRGTLGGVTRTTNEAILLCEGAGYDIILIETVGVGQSEFAVADMVDMFVLLLPPAGGDELQGIKRGIIEMADLVAVTKSDGDLIVPARRIQAEYVSALKLLRKRSQVWKPKVIRISARSGEGISEMWDKMKDFQDLMLASGELTAKRRKQQKVWMWNLIQESVLEHFRTHPTVREQIPLLEQKVLIGALSPGLAADFLLKALKAETNKIHPV

SEQ ID NO: 101119 - protein, 48 aa, Homo sapiens
MSWSPSLTTQTCGAWEMKERLGTGGFGNVIRWHNQADPPQCGGCPRCP

SEQ ID NO: 101120 - protein, 59 aa, Homo sapiens
MPADLSGTWTLLSSDNFEGYMLALDGVLLLLPRLECNGGISAHRNFRLPGSNNSPASAS

SEQ ID NO: 101121 - protein, 56 aa, Homo sapiens
MLSPVSRDASDALQGRKCLRPRSRRLPLPAAVRAHGPMAELTDSARELHFPDHVQS

SEQ ID NO: 101122 - protein, 51 aa, Homo sapiens
MSAAGLKITGSKETKRRLLLISIDWVYCQEKQEERRELPRIITGVDPKSIP

SEQ ID NO: 101123 - protein, 123 aa, Homo sapiens
MAEPSAATQSHSISSSSFGAEPSAPGGGGSPGACPALGTKSCSSSCAVHDLIFWRDVKKTGFVFGTTLIMLLSLAAFSVISVVSYLILALLSVTISFRIYKSVIQAVQKSEEGHPFNWLSSCG

SEQ ID NO: 101124 - protein, 768 aa, Homo sapiens
MANCQIAILYQRFQRVVFGISQLLCFSALISELTNQKEVAAWTYHYSTKAYSWNISRKYCQNRYTDLVAIQNKNEIDYLNKVLPYYSSYYWIGIRKNNKTWTWVGTKKALTNEAENWADNEPNNKRNNEDCVEIYIKSPSAPGKWNDEHCLKKKHALCYTASCQDMSCSKQGECLETIGNYTCSCYPGFYGPECEYVRECGELELPQHVLMNCSHPLGNFSFNSQCSFHCTDGYQVNGPSKLECLASGIWTNKPPQCLAAQCPPLKIPERGNMTCLHSAKAFQHQSSCSFSCEEGFALVGPEVVQCTASGVWTAPAPVCKAISCEPLESPVHGSMDCSPSLRAFQYDTNCSFRCAEGFMLRGADIVRCDNLGQWTAPAPVCQALQCQDLPVPNEARVNCSHPFGAFRYQSVCSFTCNEGLLLVGASVLQCLATGNWNSVPPECQAIPCTPLLSPQNGTMTCVQPLGSSSYKSTCQFICDEGYSLSGPERLDCTRSGRWTDSPPMCEAIKCPELFAPEQGSLDCSDTRGEFNVGSTCHFSCDNGFKLEGPNNVECTTSGRWSATPPTCKGIASLPTPGVQCPALTTPGQGTMYCRHHPGTFGFNTTCYFGCNAGFTLIGDSTLSCRPSGQWTAVTPACRAVKCSELHVNKPIAMNCSNLWGNFSYGSICSFHCLEGQLLNGSAQTACQENGHWSTTVPTCQAGPLTIQEALTYFGGAVASTIGLIMGGTLLALLRKRFRQKDDGKCPLNPHSHLGTYGVFTNAAFDPSP

SEQ ID NO: 101125 - protein, 80 aa, Homo sapiens
MAPAADREGYWGPTTSTLDWCEENYSVTWYIAEFWNTVSNLIMIIPPMFGAVQSVRDGLEKRYIASYLALTDGVSLCRRG

SEQ ID NO: 101126 - protein, 550 aa, Homo sapiens
MPKEKYDPPDPRRIYTIMSAEEVANGKKSHWAELEISGRVRSLSTSLWSLTHLTALHLNDNYLSRIPPDIAKLHNLVYLDLSSNKLRSLPAELGNMVSLRELLLNNNLLRVLPYELGRLFQLQTLGLKGNPLSQDILNLYQDPDGTRKLLNFMLDNLAVHPEQLPPRPWITLKERDQILPSASFTVMCYNVLCDKYATRQLYGYCPSWALNWEYRKKGIMEEIVNCDADIISLQEVETEQYFTLFLPALKERGYDGFFSPKSRAKIMSEQERKHVDGCAIFFKTEKFTLVQKHTVEFNQVAMANSDGSEAMLNRVMTKDNIGVAVVLEVHKELFGAGMKPIHAADKQLLIVANAHMHWDPEYSDVKLIQTMMFVSEVKNILEKASSRPGSPTADPNSIPLVLCADLNSLPDSGVVEYLSNGGVADNHKDFKELRYNECLMNFSCNGKNGSSEGRITHGFQLKSAYENNLMPYTNYTFDFKGVIDYIFYSKTHMNVLGVLGPLDPQWLVENNITGCPHPHIPSDHFSLLTQLELHPPLLPLVNGVHLPNRR

SEQ ID NO: 101127 - protein, 210 aa, Homo sapiens
MKHMLAASAGEVVACLIRVPSEVVKQRAQVSASTRTFQIFSNILYEEGIQGLYRGYKSTVLREIPFSLVQFPLWESLKALWSWRQDHVVDSWQSAVCGAFAGGFAAAVTTPLDVAKTRITLAKAGSSTADGNVLSVLHGVWRSQGLAGDHIPGIFLQEQSSGLPLQRVGRQLPGLRASQLAVPPPHPDAELDHLCDCSFCVPLAVLISAI

SEQ ID NO: 101128 - protein, 204 aa, Homo sapiens
MSLTVVSMACVGFFLLQGAWPHEGLYEKPSLSAQPGPTVLAGENVTLSCSSRSSYDMYHLSREGEAHERRLPAGTKVNGTFQANFPLGPATHGGTYRCFGSFRDSPYEWSKSSDPLLVSVTGNPSNSWPSPTEPSSETGNPRHLHVLIGTSVVKIPFTILLFFLLHRWCSDKKNAAVMDQEPAGNRTVNSEDSDEQDHQEVSYA

SEQ ID NO: 101129 - protein, 137 aa, Homo sapiens
MAGAVSLLGVVGLLLVSALSGVLGDRANPDLRAHPGNAAHPGSGATEPRRRPPLKDQRERTRAGSLPLGALYTAAVAAFVLYKCLQGKDETAVLHEEASKQQPLQSEQQLAQLTQQLAQTEQHLNNLMAQLDPLFER

SEQ ID NO: 101130 - protein, 334 aa, Homo sapiens
MFPLRALWLVWALLGVAGSCPEPCACVDKYAHQFADCAYKELREVPEGLPANVTTLSLSANKITVLRRGAFADVTQVTSLWLAHNEVRTVEPGALAVLSQLKNLDLSHNFISSFPWSDLRNLSALQLLKMNHNRLGSLPRDALGALPDLRSLRINNNRLAGEACHVQVVFSTKKELPSLLVIVAVSVFLLVLATVPLLGAACCHLLAKHPGKPYRLILRPQAPDPMEKRIAADFDPRASYLESEKSYPAGGEAGGEEPEDVQGEGLDEDAEQGDPSGDLQREESLAACSLVESQSKANQEEFEAGSEYSDRLPLGAEAVNIAQEINGNYRQTAG

SEQ ID NO: 101131 - protein, 372 aa, Homo sapiens
MAMVVSSWRDPQDDVAGGNPGGPNPAAQSQQHIECVVCGDKSSGKHYGQFTCEGCKSFFKRSVRRNLTYTCRANRNCPIDQHHRNQCQYCRLKKCLKVGMRREAVQRGRMPPTQPNPGQYALTNGDPLNGHCYLSGYISLLLRAEPYPTSRYGSQCMQPNNIMGIENICELAARLLFSAVEWARNIPFFPDLQITDQVSLLRLTWSELFVLNAAQCSMPLHVAPLLAAAGLHASPMSADRVVAFMDHIRIFQEQVEKLKALHVDSAEYSCLKAIVLFTSDACGLSDAAHIESLQEKSQCALEEYVRSQYPNQPSRFGKLLLRLPSLRTVSSSVIEQLFFVRLVGKTPIETLIRDMLLSGSSFNWPYMSIQCS

SEQ ID NO: 101132 - protein, 20 aa, Homo sapiens
GNTGGFKTIFGAGTRLFVKA

SEQ ID NO: 101133 - protein, 168 aa, Homo sapiens
MDNCLAAAALNGVDRRSLQRSARLALEVLERAKRRAVDWHALERPKGCMGVLAREAPHLEKQPAAGPQRVLPGEKYYSSVPEEGGATHVYRYHRGESKLHMCLDIGNGQRKDRKKTSLGPGGSYQISEHAPEASQPVSTELLTHWVSPPLQLHEPVDMVLRGLFELSL

SEQ ID NO: 101134 - protein, 43 aa, Homo sapiens
MALDVKSRAKRYEKLDFLGEGQFATVYKARDKNTNQIVAIKKV

SEQ ID NO: 101135 - protein, 142 aa, Homo sapiens
MDAEYSGNEFPRSEGERDQHQRPGKERKSGEAGWGTVTFIFSTLMLFPINIWIFELERNVSIPIGWSYFIGWLVLILYFTCAILCYFNHKSFWSLILSHPSGAVSCSSSFGSVEESPRAQTITDTPITQEGVLDPEQKDTHV

SEQ ID NO: 101136 - protein, 423 aa, Homo sapiens
MNLCLQRLDGRQTYDYRNIRISFGTDYGCCIVELGKTRVLGQVSCELVSPKLNRATEGILFFNLELSQMAAPAFEPGRQSDLLVKLNRLMERCLRNSKCIDTESLCVVAGEKVWQIRVDLHLLNHDGNIIDAASIAAIVALCHFRRPDVSVQGDEVTLYTPEERDPVPLSIHHMPICVSFAFFQQGTYLLVDPNEREERVMDGLLVIAMNKHREICTIQSSGGIMLLKDQVLRCSKIAGVKVAEITELILKALENDQKVRKEGGKFGFAESIANQRITAFKMEKAPIDTSDVEEKAEEIIAEAEPPSEVVSTPVLWTPGTAQIGEGVENSWGDLEDSEKEDDEGGGDQAIILDGIKMDTGVEVSDIGSQDAPIILSDSEEEEMIILEPDKNPKKIRTQTTSAKQEKAPSKKPVKRRKKKRAAN

SEQ ID NO: 101137 - protein, 455 aa, Homo sapiens
MSLTVVSMACVGFFLLQGAWPLMGGQDKPFLSARPSTVVPRGGHVALQCHYRRGFNNFMLYKEDRSHVPIFHGRIFQESFIMGPVTPAHAGTYRCRGSRPHSLTGWSAPSNPLVIMVTGNHRKPSLLAHPGPLLKSGETVILQCWSDVMFEHFFLHRDGISEDPSRLVGQIHDGVSKANFSIGPLMPVLAGTYRCYGSVPHSPYQLSAPSDPLDIVITGLYEKPSLSAQPGPTVQAGENVTLSCSSWSSYDIYHLSREGEAHERRLRAVPKVNRTFQADFPLGPATHGGTYRCFGSFRALPCVWSNSSDPLLVSVTGNPSSSWPSPTEPSSKSGICRHLHVLIGTSVVIFLFILLLFFLLYRWCSNKKNAAVMDQEPAGDRTVNRQDSDEQDPQEVTYAQLDHCVFIQRKISRPSQRPKTPLTDTSVYTELPNAEPRSKVVSCPRAPQSGLEGVF

SEQ ID NO: 101138 - protein, 523 aa, Homo sapiens
MFQFHAGSWESWCCCCLIPADRPWDRGQHWQLEMADTRSVHETRFEAAVKVIQSLPKNGSFQPTNEMMLKFYSFYKQATEGPCKLSRPGFWDPIGRYKWDAWSSLGDMTKEEAMIAYVEEMKKIIETMPMTEKVEELLRVIGPFYEIVEDKKSGRSSDITSDLGNVLTSTPNAKTVNGKAESSDSGAESEEEEAQEEVKGAEQSDNDKKMMKKSADHKNLEVIVTNGYDKDGFVQDIQNDIHASSSLNGRSTEEVKPIDENLGQTGKSAVCIHQDINDDHVEDVTGIQHLTSDSDSEVYCDSMEQFGQEESLDSFTSNNGPFQYYLGGHSSQPMENSGFREDIQVPPGNGNIGNMQVVAVEGKGEVKHGGEDGRNNSGAPHREKRGGETDEFSNVRRGRGHRMQHLSEGTKGRQVGSGGDGERWGSDRGSRGSLNEQIALVLMRLQEDMQNVLQRLQKLETLTALQAKSSTSTLQTAPQPTSQRPSWWPFEMSPGVLTFAIIWPFIAQWLVYLYYQRRRRKLN

SEQ ID NO: 101139 - protein, 95 aa, Homo sapiens
MAKTPSDHLLSTLEELVPYDFEKFKFKLQNTSVQKEHSRIPRSQIQRARPVKMATLLVTYYGEEYAVQLTLQVLRAINQRLLAEELHRAAIQETN

SEQ ID NO: 101140 - protein, 345 aa, Homo sapiens
MLPCFQLLRIGGGRGGDLYTFHPPAGAGCTYRLGHRADLCDVALRPQQEPGLISGIHAELHAEPRGDDWRVSLEDHSSQGTLVNNVRLPRGHRLELSDGDLLTFGPEGSPGTSPSEFYFMFQQVRVKPQDFAAITIPRSRGEARVGAGFRPMLPSQGAPQRPLSTFSPAPKATLILNSIGSLSKLRPQPLTFSPSWGGPKSLPVPAPPGEVGTTPSAPPQRNRRKSVHRVLAELDDESEPPENPPPVLMEPRKKLRVDKAPLTPTGNRRGRPRKYPVSAPMAPPAVGGGEPCAAPCCCLPQEETVAWVQCDGCDVWFHVACVGCSIQAAREADFRCPGCRAGIQT

SEQ ID NO: 101141 - protein, 146 aa, Homo sapiens
MIVFGWAVFLASRSLGQGLLLTLEEHIAHFLGTGGAATTMGNSCICRDDSGTDDSVDTQQQQAENSAVPTADTRSQPRDPVRPPRRGRGPHEPRRKKQNVDGLVLDTLAVIRTLVDNDQEPPYSMITLHEMAETDEGWLDVVQSLI

SEQ ID NO: 101142 - protein, 657 aa, Homo sapiens
MEALLEGIQNRGHGGGFLTSCEAELQELMKQIDIMVAHKKSEWEGRTHALETCLKIREQELKSLRSQLDVTHKEVGMLHQQVEEHEKIKQEMTMEYKQELKKLHEELCILKRSYEKLQKKQMREFRGNTKNHREDRSEIERLTAKIEEFRQKSLDWEKQRLIYQQQVSSLEAQRKALAEQSEIIQAQLVNRKQKLESVELSSQSEIQHLSSKLERANDTICANELEIERLTMRVNDLVGTSMTVLQEQQQKEEKLRESEKLLEALQEEKRELKAALQSQENLIHEARIQKEKLQEKVKATNTQHAVEAISLESVSATCKQLSQELMEKYEELKRMEAHNNEYKAEIKKLKEQILQGEQSYSSALEGMKMEISHLTQELHQRDITIASTKGSSSDMEKRLRAEMQKAEDKAVEHKEILDQLESLKLENRHLSEMVMKLELGLHEAKEISLADLQENYIEALNKLVSENQQLQKDLMNTKSQLEISTQMCKKQNDRIFKPTHSRTTEFKNTEFKPTHGQHRHDGIKTEHYKTDLHSPRGQASDSINPMSRVLSPLSPQISPCSSTRSLTSYSLCKTHSLPSALDTNEANFSDTMSESMNDQEEFISSCSLPVSPLGSIATRFLEEEELRSHHILERLDAHIEELKRESEKTVRQFTALK

SEQ ID NO: 101143 - protein, 123 aa, Homo sapiens
MAATLGPLGSWQQWRRCLSARDGSRMLLLLLLLGSGQGPQQVGAGQTFEYLKREHSLSKPYQAMFPERLGVAGALQNPWTRKEESAWGWLGNLVHKGSDAARACVWKHGQICGAGSICRHLPQ

SEQ ID NO: 101144 - protein, 692 aa, Homo sapiens
MGWRPRRARGTPLLLLLLLLLLWPVPGAGVLQGHIPGQPVTPHWVLDGQPWRTVSLEEPVSKPDMGLVALEAEGQELLLELEKNHRLLAPGYIETHYGPDGQPVVLAPNHTDHCHYQGRVRGFPDSWVVLCTCSGMSGLITLSRNASYYLRPWPPRGSKDFSTHEIFRMEQLLTWKGTCGHRDPGNKAGMTSLPGGPQSRGRREARRTRKYLELYIVADHTLFLTRHRNLNHTKQRLLEVANYVDQLLRTLDIQVALTGLEVWTERDRSRRQLRAFFRKGGGACLSNAPDPGLPVPPALCGNGFVEAGEECDCGPGQECRDLCCFAHNCSLRPGAQCAHGDCCVRCLLKPAGALCRQAMGDCDLPEFCTGTSSHCPPDVYLLDGSPCARGSGYCWDGACPTLEQQCQQLWGPGSHPAPEACFQVVNSAGDAHGNCGQDSEGHFLPCAGRDALCGKLQCQGGKPSLLAPHMVPVDSTVHLDGQEVTCRGALALPSAQLDLLGLGLVEPGTQCGPRMVCQSRRCRKNAFQELQRCLTACHSHGVCNSNHNCHCAPGWAPPFCDKPGFGGSMDSGPVQAENHDTFLLAMLLSVLLPLLPGAGLAWCCYRLPGAHLQRCSWGCRRDPACSGPKDGPHRDHPLGGVHPMELGPTATGQPWPLDPENSHEPSSHPEKPLPAVSPDPQDQVQMPRSCLW

SEQ ID NO: 101145 - protein, 998 aa, Homo sapiens
MKVKEEKAGVGKLDHTNHRRRFPDQKECPPIHIGLPVPTYPQRKTDQKGHLSGLQKVHWGLRPDQPQQELTGPGSGASSQDSSMDLISRTRSPAAEQLQDILGEEDEAPNPTLFTEMDTLQHDGDQMEWKESARWIKFEEKVEEGGERWSKPHVSTLSLHSLFELRTCLQTGTVLLDLDSGSLPQIIDDVIEKQIEDGLLRPELRERVSYVLLRRHRHQTKKPIHRSLADIGKSVSTTNRSPARSPGAGPSLHHSTEDLRMRQSANYGRLCHAQSRSMNDISLTPNTDQRKNKFMKKIPKDSEASNVLVGEVDFLDQPFIAFVRLIQSAMLGGVTEVPVPTRFLFILLGPSGRAKSYNEIGRAIATLMVDDLFSDVAYKARNREDLIAGIDEFLDEVIVLPPGEWDPNIRIEPPKKVPSADKRKSVFSLAELGQMNGSVGGGGGAPGGGNGGGGGGGSGGGAGSGGAGGTSSGDDGEMPAMHEIGEELIWTGRFFGGLCLDIKRKLPWFPSDFYDGFHIQSISAILFIYLGCITNAITFGGLLGDATDNYQGVMESFLGTAMAGSLFCLFSGQPLIILSSTGPILIFEKLLFDFSKGNGLDYMEFRLWIGLHSAVQCLILVATDASFIIKYITRFTEEGFSTLISFIFIYDAIKKMIGAFKYYPINMDFKPNFITTYKCECVAPDTVNTTVFNASAPLAPDTNASLYNLLNLTALDWSLLSKKECLSYGGRLLGNSCKFIPDLALMSFILFFGTYSMTLTLKKFKFSRYFPTKPTRPDRGWFVAPFGKNPWWVYPASILPALLVTILIFMDQQITAVIVNRKENKLKGTESNRHHRLHPDGNLCLPGSHPKVYPPAGAVRSLPLHGRGLPEWHPVLGTLQALPDASQAPAGPCLPAARAAAPDPPLHPGADPLPGGALDPQIHGGCHHLPGHVSLHHRSWASSSFEGFWISSFPSTTWPGLTTSSQRRKKRRQTRRGREKKGPTRTVMRSPSSLLPRL

SEQ ID NO: 101146 - protein, 138 aa, Homo sapiens
MSPERSQEESPEGDTERTERKPMVKDAFKDISIYFTKEEWAEMGDWEKTRYRNVKMNYNALITVGLRATRPAFMCHRRQAIKLQVDDTEDSDEEWTPRQQVKPPWMAFRGEQSKHQKIVRCVRTSSLTAVLLMGPLHL

SEQ ID NO: 101147 - protein, 231 aa, Homo sapiens
MEPGDEDLDCDNDHVSKMSRIFNPHLNKTANGDCRRDPRERSRSPIERAVAPTMSLHGSHLYTSLPSLGLEQPLALTKNSLDASRPAGLSPTLTPGERQQNRPSVITCASAGARNCNLSHCPIAHSGCAAPGPASYRRPPSAATTCDPVVEEHFRRSLGKNYKEPEPAPNSVSITGSVDDHFAKALGDTWLQIKAAKDGASSSPESASRRGQPASPSAHMVSHSHSPSVVS

SEQ ID NO: 101148 - protein, 1034 aa, Homo sapiens
MASTRCKLARYLEDLEDVDLKKFKMHLEDYPPQKGCIPLPRGQTEKADHVDLATLMIDFNGEEKAWAMAVWIFAAINRRDLYEKAKRDEPKWGSDNARVSNPTVICQEDSIEEEWMGLLEYLSRISICKMKKDYRKKYRKYVRSRFQCIEDRNARLGESVSLNKRYTRLRLIKEHRSQQEREQELLAIGKTKTCESPVSPIKMELLFDPDDEHSEPVHTVVFQGAAGIGKTILARKMMLDWASGTLYQDRFDYLFYIHCREVSLVTQRSLGDLIMSCCPDPNPPIHKIVRKPSRILFLMDGFDELQGAFDEHIGPLCTDWQKAERGDILLSSLIRKKLLPEASLLITTRPVALEKLQHLLDHPRHVEILGFSEAKRKEYFFKYFSDEAQARAAFSLIQENEVLFTMCFIPLVCWIVCTGLKQQMESGKSLAQTSKTTTAVYVFFLSSLLQPRGGSQEHGLCAHLWGLCSLAADGIWNQKILFEESDLRNHGLQKADVSAFLRMNLFQKEVDCEKFYSFIHMTFQEFFAAMYYLLEEEKEGRTNVPGSRLKLPSRDVTVLLENYGKFEKGYLIFVVRFLFGLVNQERTSYLEKKLSCKISQQIRLELLKWIEVKAKAKKLQIQPSQLELFYCLYEMQEEDFVQRAMDYFPKIEINLSTRMDHMVSSFCIENCHRVESLSLGFLHNMPKEEEEEEKEGRHLDMVQCVLPSSSHAACSHGLVNSHLTSSFCRGLFSVLSTSQSLTELDLSDNSLGDPGMRVLCETLQHPGCNIRRLWLGRCGLSHECCFDISLVLSSNQKLVELDLSDNALGDFGIRLLCVGLKHLLCNLKKLWLVSCCLTSACCQDLASVLSTSHSLTRLYVGENALGDSGVAILCEKAKNPQCNLQKLGLVNSGLTSVCCSALSSVLSTNQNLTHLYLRGNTLGDKGIKLLCEGLLHPDCKLQVLELDNCNLTSHCCWDLSTLLTSSQSLRKLSLGNNDLGDLGVMMFCEVLKQQSCLLQNLGLSEMYFNYETKSALETLQEEKPELTVVFEPSW

SEQ ID NO: 101149 - protein, 36 aa, Homo sapiens
MSVSEIFVELQGFLAAEQDIREASPLPSPFPLPFHA

SEQ ID NO: 101150 - protein, 527 aa, Homo sapiens
MKDIQGWTALFHCTSAGHQHMVRFLLDSGANANVREPICGFTPLMEAAAAGHEIIVQYFLNHGVKVDARDHSGATARMLAKQYGHMKIVALMDTYSPSLPKSLYRSPEKYEDLSSSDESCPAPQRQRPCRKKGVSIHEGPRALARITGIGLGGRAPRPRYEQAPPRGYVTFNSSGENPLEEEGLCCRDVTSPINERDVESSSSSSSREEHAFCANLGPVQSSSSSEGLARAQGLSSEASVESNEDSDHACKSSARKQAKSYMKTKNPDSQWPPRAATDREGFLAESSPQTQRAPYSGPQDLAALLEQIGCLKYLQVFEEQDVDLRIFLTLTESDLKEIGITLFGPKRKMTSAIARWHSSARPPGDALELAYADRLEAEMQELAIQLHKRCEEVEATRGQVCQEQELRAVVESCLLEQDRAREDLQARLRETWALARDAALVLDQLRACQAELSSRVRQDQPPGAATLGLAVPPADSKGWQASLQAMSLPELSGALEDRVREMGQALCLVTQSLEKLQVLNGKKWRET

SEQ ID NO: 101151 - protein, 892 aa, Homo sapiens
MHGFRRTLRNAVLTQKQDSLRIISIQPVAGTNQLDMLFAVEMHSSEFYKPAYLIQKLSNARRHLENIMRISAILEKNCSGLDCQEQHCEQGLSLDSHALMTYSTARISFVCPRFYRNVRCTCNGGLCPGSNDPCVEKPCPGDMQCVSYEASRRPFLCQCPPGKLGECSGHTSLSFAGNSYIKYRLSENSKEEDFKLALRLRTLQSNGIIMYTRANPCIILKIVDGKLWFQLDCGSGPGILGISGRAVNDGSWHSVFLELNRNFTSLSLDDSYVERRRAPLYFQTLSTESSIYFGALVQADNIRSLTDTRVTQVLSGFQGCLDSVILNNNELPLQNKRSSFAEVVGLTELKLGCVLYPDACKRSPCQHGGSCTGLPSGGYQCTCLSQFTGRNCESEITACFPNPCRNGGSCDPIGNTFICNCKAGLTGVTCEEDINECEREECENGGSCVNVFGSFLCNCTPGYVGQYCGLRPVVVPNIQAGHSYVGKEELIGIAVVLFVIFILVVLFIVFRKKVFRKNYSRNNITLVQDPATAALLNKSNGIPFRNLRGSGDGRNVYQEVGPPQVPVRPMAYTPCFQSDSRSNLDKIVDGLGGEHQEMTTFHPESPRILTARRGVVVCSVAPNLPAVSPCRSDCDSIRKNGWDAGTENKGVDDPGEVTCFAGSNKGSNSEVQSLSSFQSDSGDDNAYHWDTSDWMPGARLSDIEEVPNYENQDGGSAHQGSTRELESDYYLGGYDIDSEYPPPHEEEFLSQDQLPPPLPEDFPDQYEALPPSQPVSLASTLSPDCRRRPQFHPSQYLPPHPFPNETDLVGPPASCEFSTFAVSMNQGTEPTGPADSVSLSLHNSRGTSSSDVSANCGFDDSEVAMSDYESVGELSLASLHIPFVETQHQTQV

SEQ ID NO: 101152 - protein, 102 aa, Homo sapiens
MLKAVILIGGPQKGTRFRPLSFEVPKPLFPVAGVPMIQHHIEACAQVPGMQEILLIGFYQPDEPLTQFLEAAQQEFNLPVRSWLGAPRHSSCSMLMSAPTSP

SEQ ID NO: 101153 - protein, 137 aa, Homo sapiens
MSRYGRYGGETKVYVGNLGTGAGKGELERAFSYYGPLRTVWIARNPPGFAFVEFEDPRDAEDAVRGLDGKVICGSRVRVELSTGMPRRSRFDRPPARRPFDPNDRCYECGEKGHYAYDCHRYSRRRRSRFLRLSQSP

SEQ ID NO: 101154 - protein, 59 aa, Homo sapiens
MEESQSLNEPSPKQLDEPTDAEPVDTEGQLCWQKSFTCHSVGIKVKKYQRSLQSLSKEA

SEQ ID NO: 101155 - protein, 73 aa, Homo sapiens
MKIFLPVLLAALLGVERASSLMCFSCLNQKSNLYCLKPTICSDQDNYCVTVSASAGIGECQASDRAFLPWPSP

SEQ ID NO: 101156 - protein, 377 aa, Homo sapiens
MSEVGGSVEDLIAKGPVSKYSQAVPAVTEGPIPEVLKNYMDAQYYGEIGIGTPPQCFTVVFDTGSSNLWVPSIHCKLLDIACWIHHKYNSDKSSTYVKNGTSFDIHYGSGSLSGYLSQDTVSVPCQSASSASALGGVKVERQVFGEATKQPGITFIAAKFDGILGMAYPRISVNNVLPVFDNLMQQKLVDQNIFSFYLSRDPDAQPGGELMLGGTDSKYYKGSLSYLNVTRKAYWQVHLDQVEVASGLTLCKEGCEAIVDTGTSLMVGPVDEVRELQKAIGAVPLIQGEYMIPCEKVSTLPAITLKLGGKGYKLSPEDYTLKVSQAGKTLCLSGFMGMDIPPPSGPLWILGDVFIGRYYTVFDRDNNRVGFAEAARL

SEQ ID NO: 101157 - protein, 417 aa, Homo sapiens
MGDEDKRITYEDSEPSTGMNYTPSMHQEAQEETVMKLKGIDANEPTEGSILLKSSEKKLQETPTEANHVQRLRQMLACPPHGLLDRVITNGMLLAGFLIRNIPVINDNVQIKHKWSSSLRSIALSIILVRAGLGLDSKALKKLKGVCVRLSMGPCIVEACTSALLAHYLLGLPWQWGFILGFVLGAVSPAVVVPSMLLLQGGGYGVEKGVPTLLMAAGSFDDILAITGFNTCLGIAFSTGSTVFNVLRGVLEVVIGVATGSVLGFFIQYFPSRDQDKLVCKRTFLVLGLSVLAVFSSVHFGFPGSGGLCTLVMAFLAGMGWTSEKAEVEKIIAVAWDIFQPLLFGLIGAEVSIASLRPETVGCNRICGFGHSKVTWRETIRRLWNGCVDSGIFVHPHHSPNWKSAYWFTGPQASAES

SEQ ID NO: 101158 - protein, 137 aa, Homo sapiens
MESHVQCSGMFSLAKYLAQIIVMGVQVVGRAFARALRQEFAASRAAADARGRAGHRSAAASNLSGLSLQEAQQILNVSKLSPEEVQKNYEHLFKVNDKSVGGSFYLQSKVVRAKERLDEELKIQAQEDREKGQMPHT

SEQ ID NO: 101159 - protein, 179 aa, Homo sapiens
MRALVLLLSLFLLGGQAQHVSDWTYSEGALDEAHWPQHYPACGGQRQSPINLQRTKVRYNPSLKGLNMTGYETQAGEFPMVNNGHTDWQAELFLPSLSSPCGEGAKHKGQRQWLCSPSLDSWWEAIIDGGSLWATLAECGLRAEGPEEGRHMEEKSPASQGACSGSRLPISRGPCTFFL

SEQ ID NO: 101160 - protein, 1062 aa, Homo sapiens
MEVYASEKEQHGDLCRPGEHVTSRFKNEVERMGFDMNNAWRISNINEKYKLCGSYPQELIVPAWITDKELESVSSFRSWKRIPAVIYRHQSNGAVIARCGQPEVSWWGWRNADDEHLVQSVAKACASDSRSSGSKLSTRNTSRDFPNGGDLSDVEFDSSLSNASGAESLAIQPQKLLILDARSYAAAVANRAKGGGCECPEYYPNCEVVFMGMANIHSIRRSFQSLRLLCTQMPDPGNWLSALESTKWLHHLSVLLKSALLVVHAVDQDQRPVLVHCSDGWDRTPQIVALAKLLLDPYYRTIEGFQVLVEMEWLDFGHKFADRCGHGENSDDLNERCPVFLQWLDCVHQLQRQFPCSFEFNEAFLVKLVQHTYSCLFGTFLCNNAKERGEKHTQERTCSVWSLLRAGNKAFKNLLYSSQSEAVLYPVCHVRNLMLWSAVYLPCPSPTTPVDDSCAPYPAPGTSPDDPPLSRLPKTRSYDNLTTACDNTVPLASRRCSDPSLNEKWQEHRRSLELSSLAGPGEDPLSADSLGKPTRVPGGAELSVAAGVAEGQMENILQEATKEESGVEEPAHRAGIEIQEGKEDPLLEKESRRKTPEASAIGLHQDPELGDAALRSHLDMSWPLFSQGISEQQSGLSVLLSSLQVPPRGEDSLEVPVEQFRIEEIAEGREEAVLPIPVDAKVGYGTSQSCSLLPSQVPFETRGPNVDSSTDMLVEDKVKSVSGPQGHHRSCLVNSGKDRLPQTMEPSPSETSLVERPQVGSVVHRTSLGSTLSLTRSPCALPLAECKEGLVCNGAPETENRASEQPPGLSTLQMYPTPNGHCANGEAGRSKDSLSRQLSAMSCSSAHLHSRNLHHKWLHSHSGRPSATSSPDQPSRSHLDDDGMSVYTDTIQQRLRQIESGHQQEVETLKKQVQELKSRLESQYLTSSLHFNGDFGDEVTSIPDSESNLDQNCLSRCSTEIFSEASWEQVDKQDTEMTRWLPDHLAAHCYACDSAFWLASRKHHCRNCGNVFCSSCCNQKVPVPSQQLFEPSRVCKSCYSSLHPTSSSIDLELDKPIAATSN

SEQ ID NO: 101161 - protein, 110 aa, Homo sapiens
MADTIFGSGNDQWVCPNDRQLALRAKLQTGWSVHTYQTEKQRRKQHLSPAEVEAILQVIQRAERLDVLEQQRIGRLVERLETMRRNVMGNGLSQCLLCGEVLGFLGSSSV

SEQ ID NO: 101162 - protein, 343 aa, Homo sapiens
MAAQYGSMSFNPSTPGASYGERAFSAPQTRLQGGPGRQEPRNSQLRIVLVGKTGAGKSATGNSILGRKVFHSGTAAKSITKKCEKRSSSWKETELVVVDTPGIFDTEVPNAETSKEIIRCILLTSPGPHALLLVVPLGRYTEEEHKATEKILKMFGERARSFMILIFTRKDDLGDTNLHDYLREAPEDIQDLMDIFGDRYCALNNKATGAEQEAQRAQLLGLIQRVVRENKEGCYTNRMYQRAEEEIQKQTQAMQELHRVELEREKARIREEYEEKIRKLEDKVEQEKRKKQMEKKLAEQEAHYAVRQQRARTEVESKDGILELIMTALQIASFILLRLFAED

SEQ ID NO: 101163 - protein, 55 aa, Homo sapiens
MLWFQGNSMQLARSSFGLFLRNCSASKTTLPVLTLFTKEFLSTRSLFACCHPCKM

SEQ ID NO: 101164 - protein, 83 aa, Homo sapiens
MPRVKAAQAGRQSSAKRHLAEQFAVGEIITDMAKKEWKVGLPIGQGGFGCIYLADMNSSESVGSDAPCVVKVLQVYDNGSLWE

SEQ ID NO: 101165 - protein, 202 aa, Homo sapiens
MTLSTLARKRKAPLACTCSLGGPDMIPYFSANAVISQNAINQLISESFLTVKGAALFLPRGNGSSTPRISHRRNKHAGDLQQHLQAMFILLRPEDNIRLAVRLESTYQNRTRYMVVVSTNGRQDTEESIVLGMDFSSNDSSTCTMGLVLPLWSDTLIHLDGDGGFSVSTDNRVHIFKPVSVQAMWVDRDSRNKHCDVLLVEE

SEQ ID NO: 101166 - protein, 604 aa, Homo sapiens
MKRLHIFGPKIHSSGGLWQQKGDFTWNSMSGRSVRLRSVPIQSLSELERARLQEVAFYQLQQDCDLSCQITIPKDGQKRKKSLRKKLDSLGKEKNKDKEFIPQAFGMPLSQVIANDRAYKLKQDLQRDEQKDASDFVASLLPFGNKRQNKELSSSNSSLSSTSETPNESTSPNTPEPAPRARRRGAMSVDSITDLDDNQSRLLEALQLSLPAEAQSKKEKARDKKLSLNPIYRQVPRLVDSCCQHLEKHGLQTVGIFRVGSSKKRVRQLREEFDRGIDVSLEEEHSVHDVAALLKEFLRDMPDPLLTRELYTAFINTLLLEPEEQLGTLQLLIYLLPPCNCDTLHRLLQFLSIVARHADDNISKDGQEVTGNKMTSLNLATIFGPNLLHKQKSSDKEFSVQSSARAEESTAIIAVVQKMIENYEALFMVPPDLQNEVLISLLETDPDVVDYLLRRKASQSSSPDMLQSEVSFSVGGRHSSTDSNKASSGDISPYDNNSPVLSERSLLAMQEDAAPGGSEKLYRVPGQFMLVGHLSSSKSRESSPGPRLGKDLSEEPFDIWGTWHSTLKSGSKDPGMTGTTPLLNISSQEDHRQKDLRLIFKIYP

SEQ ID NO: 101167 - protein, 51 aa, Homo sapiens
MPAATVDHSQRICEVWACNLDEEMKKIRQVIRKYNYVAMFFKKLGFSIGIL

SEQ ID NO: 101168 - protein, 120 aa, Homo sapiens
MSRRFTVTSLPPAGPARSPDPESRRHSVADPRHLPGEDVKVSPQGALIRGPLPGSEALGSGRNKANRLVVAPARGGGGGGGGGGGRGGGGRGGGRGGGGEGGGEASPDRQGSLPSRSKSN

SEQ ID NO: 101169 - protein, 410 aa, Homo sapiens
MSLMVVSMACVGFFLLEGPWPHVGGQDKPFLSAWPGTVVSEGQHVTLQCRSRLGFNEFSLSKEDGMPVPELYNRIFRNSFLMGPVTPAHAGTYRCCSSHPHSPTGWSAPSNPVVIMVTGVHRKPSLLAHPGPLVKSGETVILQCWSDVRFERFLLHREGITEDPLRLIGQLHDAGSQVNYSMGPMTPALAGTYRCFGSVTHLPYELSAPSDPLDIVVVGLYGKPSLSAQPGPTVQAGENVTLSCSSRSLFDIYHLSREAEAGELRLTAVLRVNGTFQANFPLGPVTHGGNYRCFGSFRALPHAWSDPSDPLPVSVTGNSRYLHALIGTSVVIIPFAILLFFLLHRWCANKKNAVVMDQEPAGNRTVNREDSDEQDPQEVTYAQLNHCVFTQRKITRPSQRPKTPPTDTSV

SEQ ID NO: 101170 - protein, 165 aa, Homo sapiens
MKEDQVVAEEPGFQDEEESLFQDIDLLQKHGINVADIKKLKSVGICTIKGIQMTTRRALCNVKGLSEAKVDKIKEAANKLIEPGFLTAFEYSEKRKMVFHITTGSQEFDKLLGGGIESMAITEAFGEFRTGKTQLSHTLCVTAQLPGAGGYPGGKIIFIDTENTL

SEQ ID NO: 101171 - protein, 119 aa, Homo sapiens
MEASALTSSAVTSVAKVVRVASGSAVVLPLARIATVVIGGVAAVPMVLSAMGFTAAGIASSSIAAKMMSAAAIANGGGVASGSLVATLQSLGATGLSGLTKFILGSIGSAIAAVIARFY

SEQ ID NO: 101172 - protein, 215 aa, Homo sapiens
MPPAVGGPVGYTPPDGGWGWAVVIGAFISIGFSYAFPKSITVFFKEIEGIFHATTSEVSWISSIMLAVMYGGGPISSILVNKYGSRIVMIVGGCLSGCGLIAASFCNTVQQLYVCIGVIGGLGLAFNLNPALTMIGKYFYKRRPLANGLAMAGSPVFLCTLAPLNQVFFGIFGWRGSFLILGGLLLNCCVAGALMRPIGPKPTKAGKDKSKASLE

SEQ ID NO: 101173 - protein, 469 aa, Homo sapiens
MMRLGGRLVLNTKEELANERLMTLKIAEMKEAMRTLIFPPSMHFFQAKHLIERSQVFNILRMMPKGAALHLHDIGIVTMDWLVRNVTYRPHCHICFTPRGIMQFRFAHPTPRPSEKCSKWILLEDYRKRVQNVTEFDDSLLRNFTLVTQHPEVIYTNQNVVWSKFETIFFTISGLIHYAPVFRDYVFRSMQEFYEDNVLYMEIRARLLPVYELSGEHHDEEWSVKTYQEVAQKFVETHPEFIGIKIIYSDHRSKDVAVIAESIRMAMGLRIKFPTVVAGFDLVGHEDTGHSLHDYKEALMIPAKDGVKLPYFFHAGETDWQGTSIDRNILDALMLNTTRIGHGFALSKHPAVRTYSWKKDIPIEVCPISNQVLKLVSDLRNHPVATLMATGHPMVISSDDPAMFGAKGLSYDFYEVFMGIGGMKADLRTLKQLAMNSIKYSTLLESEKNTFMEIWKKRWDKFIADVATK

SEQ ID NO: 101174 - protein, 148 aa, Homo sapiens
MAGTLDLDKGCTVEELLRGCIEAFDDSGKVRDPQLVRMFLMMHPWYIPSSQLAAKLLHIYQQSRKDNSNSLQVKTCHLVRYWISAFPAEFDLNPELAEQIKELKALLDQEGNRRHSSLIDIDSVCVGGAQRAGGALSILYHLCLINVC

SEQ ID NO: 101175 - protein, 474 aa, Homo sapiens
MGVVLSPHPAPSRREPLAPLAPGTRPGWSPAVSGSSRSALRPSTAGPGPGPGTGWGGTAASGRWVPAPAVHCAAPRAAAGHQQHHGPPLCSPDGAPRRFKRRPGSPAPAAQTGETSLREQPHGGPPAVPFVVPPTLQGRDWVPLHSGEWADAPWDPCPASELLPHTSSGGLGDACMVGAINPELYKFPEDKSETDFPDGCLGRLWFSVEYEQEAERLLVGLIKAQHLQAPSETCSPLVKLYLLPDERRFLQSKTKRKTSNPQFDEHFIFQVSSKTITQRVLKFSVYHVDRQRKHQLLGQVLFPLKNETLVGDCRRVIWRDLEAESLEPPSEFGDLQFCLSYNDYLSRLTVVVLRAKGLRLQEDRGIVSVFVKVSLMNHNKFVKCKKTSAVLGSINPVYNETFSFKADATELDTASLSLTVVQNMEGDKSQQLGRVVVGPYMYTRGRELEHWDEMLSKPKELVKRWHALCRTTEP

SEQ ID NO: 101176 - protein, 193 aa, Homo sapiens
  MOD_RES (1)..(1): Any amino acid
XISLKILNLEGQQFPDEETSEKFAYILGSLSNLEELILPTGDGIYRVAKLIIQQCQQLHCLRVLSFFKTLNDDSVVEIDGVLLCHPGWSAVVGFWLTATSTSQVQADSPASASRVAGITAKVAISGGFQKLENLKLSINHKITEEGYRNFFQALDNMPNLQELDISRHFTECIKAQATTVKSLSQCVLRLPRL

SEQ ID NO: 101177 - protein, 137 aa, Homo sapiens
MARGRHVGSSETKLLQHLLEACGRCEEVPEAYVDIHTGLSGSGVAFVCAFSEALAEGAVKMGMPSSLAHRIAAQTLLGTAKMLLHEGQHPAQLRSDVCTPGGTTIYGLHALEQGGLRAATMSAVEAATCRAKELSRK

SEQ ID NO: 101178 - protein, 791 aa, Homo sapiens
MLCEEAAQKRKGKEPGMALPQGRLTFRDVAIEFSLAEWKCLNPSQRALYREVMLENYRNLEAVDISSKRMMKEVLSTGQGNTEVIHTGTLQRYQSYHIGDFCFQEIEKEIHDIEFQCQEDERNGHEAPMTKIKKLTGSTDQHDHRHAGNKPIKDQLGSSFYSHLPELHIIQIKGKIGNQFEKSTSDAPSVSTSQRISPRPQIHISNNYGNNSPNSSLLPQKQEVYMREKSFQCNESGKAFNCSSLLRKHQIPHLGDKQYKCDVCGKLFNHKQYLTCHCRCHTGEKPYKCNECGKSFSQVSSLTCHRRLHTAVKSHKCNECGKIFGQNSALVIHKAIHTGEKPYKCNECDKAFNQQSNLARHRRIHTGEKPYKCEECDKVFSRKSTLESHKRIHTGEKPYKCKVCDTAFTWNSQLARHKRIHTGEKTYKCNECGKTFSHKSSLVCHHRLHGGEKSYKCKVCDKAFAWNSHLVRHTRIHSGGKPYKCNECGKTFGQNSDLLIHKSIHTGEQPYKYEECEKVFSCGSTLETHKIIHTGEKPYKCKVCDKAFACHSYLAKHTRIHSGEKPYKCNECSKTFRLRSYLASHRRVHSGEKPYKCNECSKTFSQRSYLHCHRRLHSGEKPYKCNECGKTFSHKPSLVHHRRLHTGEKSYKCTVCDKAFVRNSYLARHTRIHTAEKPYKCNECGKAFNQQSQLSLHHRIHAGEKLYKCETCDKVFSRKSHLKRHRRIHPGKKPYKCKVCDKTFGSDSHLKQHTGLHTGEKPYKCNECGKAFSKQSTLIHHQAVHGVGKLD

SEQ ID NO: 101179 - protein, 113 aa, Homo sapiens
MRQNPTETLRRVLPKVREALHVAGVEMQLTAAMSFLTILQDESVSIHAYTHSFLQVILLHLEHRDTGVSNAWLETLLSVIEVLPKETLRHEILNPLVSKAQLSQTVQSRLVSC

SEQ ID NO: 101180 - protein, 852 aa, Homo sapiens
MFFACYCALRTNVKKYRYQDEDAPHDHSLPRLTHEVRGPELVHVSEKNLSQIENVHGYVLQSHISPLKASPAPIIVNTDTLDTIPYVNGTEIEYEFEEITLERGNSGLGFSIAGGTDNPHIGDDPGIFITKIIPGGAAAEDGRLRVNDCILRVNEVDVSEVSHSKAVEALKEAGSIVRLYVRRRRPILETVVEIKLFKGPKGLGFSIAGGVGNQHIPGDNSIYVTKIIDGGAAQKDGRLQVGDRLLMVNNYSLEEVTHEEAVAILKNTSEVVYLKVGKPTTIYMTDPYGPPDITHSYSPPMENHLLSGNNGTLEYKTSLPPISPGRYSPIPKHMLVDDDYTRPPEPVYSTVNKLCDKPASPRHYSPVECDKSFLLSAPYSHYHLGLLPDSEMTSHSQHSTATRQPSMTLQRAVSLEGEPRKVVLHKGSTGLGFNIVGGEDGEGIFVSFILAGGPADLSGELQRGDQILSVNGIDLRGASHEQAAAALKGAGQTVTIIAQYQPEDYARFEAKIHDLREQMMNHSMSSGSGSLRTNQKRSLYVRAMFDYDKSKDSGLPSQGLSFKYGDILHVINASDDEWWQARRVMLEGDSEEMGVIPSKRRVERKERARLKTVKFNAKPGVIDSKGDIPGLGDDGYGTKTLRGQEDLILSYEPVTRQEINYTRPVIILGPMKDRINDDLISEFPDKFGSCVPHTTRPKRDYEVDGRDYHFVISREQMEKDIQEHKFIEAGQYNDNLYGTSVQSVRFVAERGKHCILDVSGNAIKRLQVAQLYPIAIFIKPRSLEPLMEMNKRLTEEQAKKTYDRAIKLEQEFGEYFTAIVQGDTLEDIYNQCKLVIEEQSGPFIWIPSKEKL

SEQ ID NO: 101181 - protein, 89 aa, Homo sapiens
MGVQVETISPGDGRTFPKRGQTCVVHYTDECGSESQTDYISRLCLWCHWAPRHHPTTCHSRLRCGASKTGMTGMASSLSSLFLGKEMEY

SEQ ID NO: 101182 - protein, 175 aa, Homo sapiens
  MOD_RES (1)..(1): Any amino acid
XQLDIISMAETTMMPEEIELEMAKIQRLREVLVRRESELRFMMDDIQLCKDIMDLKQELQNLVAIPEKEKTKLQKQREDELIQKIHKLVQKRDFLVDDAEVERLREQEEDKEMADFLRIKLKPLDKVTKSPAICLRCVPGGGLDWHGSSVQKSQQGTGSSDVKARAVENGTQSRC

SEQ ID NO: 101183 - protein, 130 aa, Homo sapiens
MCNTNMSVPTDGAVTTSQIPASEQETLVRPKPLLLKLLKSVGAQKDTYTMKEFEREETQDKEESVESSLPLNAIEPCVICQGRPKNGCIVHGKTGHLMACFTCAKKLKKRNKPCPVCRQPIQMIVLTYFP

SEQ ID NO: 101184 - protein, 120 aa, Homo sapiens
MSSTLPALLCVEMYDTPTLSVHPGPEVISGEKVTFYCRLDTATSMFLLLKEGRSSHVQRGYGKVQAEFPLGPVTTAHRGTYRCFGSYNNHAWSFPSEPVKLLVTGDIENTSLAPEDPTFP

SEQ ID NO: 101185 - protein, 319 aa, Homo sapiens
MTQLTASGNQTMVTEFLFSMFPHAHRGGLLFFIPLLLIYGFILTGNLIMFIVIQVGMALHTPLYFFISVLSFLEICYTTTTIPKMLSCLISEQKSISVAGCLLQMYFFHSLGITESCVLTAMAIDRYIAICNPLRYPTIMIPKLCIQLTVGSCFCGFLLVLPEIAWISTLPFCGSNQIHQIFCDFTPVLSLACTDTFLVVIVDAIHAAEIVASFLVIALSYIRIIIVILGMHSAEGHHKAFSTCAAHLAVFLLFFGSVAVMYLRFSATYSVFWDTAIAVTFVILAPFFNPIIYSLKNKDMKEAIGRLFHYQKRAGWAGK

SEQ ID NO: 101186 - protein, 592 aa, Homo sapiens
MEELVVEVRGSNGAFYKAFVKDVHEDSITVAFENNWQPDRQIPFHDVRFPPPVGYNKDINESDEVEVYSRANEKEPCCWWLAKVRMIKGEFYVIEYAACDATYNEIVTIERLRSVNPNKPATKDTFHKIKLDVPEDLRQMCAKEAAHKDFKKAVGAFSVTYDPENYQLVILSINEVTSKRAHMLIDMHFRSLRTKLSLIMRNEEASKQLESSRQLASRFHEQFIVREDLMGLAIGTHGANIQQARKVPGVTAIDLDEDTCTFHIYGEDQDAVKKARSFLEFAEDVIQVPRNLVVIGKNGKLIQEIVDKSGVVRVRIEAENEKNVPQEEEIMPPNSLPSNNSRVGPNAPEEKKHLDIKENSTHFSQPNSTKVQRGMVPFVFVGTKDSIANATVLLDYHLNYLKEVDQLRLERLQIDEQLRQIGASSRPPPNRTDKEKSYVTDDGQGMGRGSRPYRNRGHGRRGPGYTSGTNSEASNASETESDHRDELSDWSLAPTEEERESFLRRGDGRRRGGGGRGQGGRGRGGGFKGNDDHSRTDNRPRNPREAKGRTTDGSLQNTSSEGSRLRTGKDRNQKKEKPDSVDGQQPLVNGVP

SEQ ID NO: 101187 - protein, 136 aa, Homo sapiens
MFSLSSTVQPQVTVPLSHLINAFHTPKNTSVSLSGVSVSQNQHRDVVPEHEAPSSECMFSDFLTKLNIVSIGKGKIFEGYRSMFMEPAKRMKKSLDTTDNWHIRPEPFSLSIPVHCGFLQMPIVYDLFCPSFLVTA

SEQ ID NO: 101188 - protein, 372 aa, Homo sapiens
MDAALLLNVEGVKKTILHGGTGELPNFITGSRERTVIDDSRQVGQPMHIIIGNMFKLEVWEILLTSMRVHEVAEFWCDTIHTGVYPILSRSLRQMAQGKDPTEWHVHTCGLANMFAYHTLGYEDLDELQKEPQPLVFVIELLQVDAPSDYQRETWNLSNHEKMKAVPVLHGEGNRLFKLGRYEEASSKYQEAIICLRNLQTKEKPWEVQWLKLEKMINTLILNYCQCLLKKEEYYEVLEHTSDILRHHPGIVKAYYVRARAHAEVWNEAEAKADLQKVLELEPSMQKAVRRELRLLENRMAEKQEEERLRCRNMLSQGATQPPAEPPTEPPAQSSTEPPAEPPTAPSAELSAGPPAEPATEPPPSPGHSLQH

SEQ ID NO: 101189 - protein, 250 aa, Homo sapiens
MAPVGKRIGGLGDTRVGGPCISQQHESLEKDNLALRKEIQSLQAELAWWSRTLHVHERLCPMDCASCSAPGLLGCWDQAEGLLGPGPQGQHGCREQLELFQTPGSCYPAQPLSPGPQPHDSPSLLQCPLPSLSLGPAVVAEPPVQLSPSPLLFASHTGSSLQGSSSKLSALQPSLTAQTAPPQPLELEHPTRGKLGSSPDNPSSALGLARLQSREHKPALSAATWQGLVVDPSPHPLLAFPLLSSAQVHF

SEQ ID NO: 101190 - protein, 43 aa, Homo sapiens
MQLPRWWELGDPCAWTGQGRGTRRMSPATTGTFLLTVEYERDK

SEQ ID NO: 101191 - protein, 78 aa, Homo sapiens
  MOD_RES (1)..(1): Any amino acid
XPDPREGAAAGPAVPTHLLPRGEERCHLGTVQAGGAGPDLPAALGGTGLPGEAAGGLCLGPGHMQPCVCPLDATCSEP

SEQ ID NO: 101192 - protein, 1093 aa, Homo sapiens
MGGKAWPRRAVGTAGGPCAEQISAPFQTLLMPHLPLASFRPPFWGLRHSRGLPRFHSVSTQSEPHGSPISRRNREAKQKRLREKQATLEAEIAGESKSPAESIKAWRPKELVLYEIPTKPGEKKDVSGPLPPAYSPRYVEAAWYPWWVREGFFKPEYQARLPQATGETFSMCIPPPNVTGSLHIGHALTVAIQDALVRWHRMRGDQVLWVPGSDHAGIATQAVVEKQLWKERGVRRHELSREAFLREVWQWKEAKGGEICEQLRALGASLDWDRECFTMDVGSSVAVTEAFVRLYKAGLLYRNHQLVNWSCALRSAISDIEVENRPLPGHTQLRLPGCPTPVSFGLLFSVAFPVDGEPDAEVVVGTTRPETLPGDVAVAVHPDDSRYTHLHGRQLRHPLMGQPLPLITDYAVQPHVGTGAVKVTPAHSPADAEMGARHGLSPLNVIAEDGTMTSLCGDWLQGLHRFVAREKIMSVLSERGLFRGLQNHPMVLPICSRSGDVIEYLLKNQWFVRCQEMGARAAKAVESGALELSPSFHQKNWQHWFSHIGDWCVSRQLWWGHQIPAYLVVEDHAQGEEDCWVVGRSEAEAREVAAELTGRPGAELTLERDPDVLDTWFSSALFPFSALGWPQETPDLARFYPLSLLETGSDLLLFWVGRMVMLGTQLTGQLPFSKVLLHPMVRDRQGRKMSKSLGNVLDPRDIISGVEMQVLQEKLRSGNLDPAELAIVAAAQKKDFPHGIPECGTDALRFTLCSHGVQAGDLHLSVSEVQSCRHFCNKIWNALRFILNALGEKFVPQPAEELSPSSPMDAWILSRLALAAQECERGFLTRELSLVTHALHHFWLHNLCDVYLEAVKPVLWHSPRPLGPPQVLFSCADLGLRLLAPLMPFLAEELWQRLPPRPGCPPAPSISVAPYPSACSLEHWRQPELERRFSRVQEVVQVLRALQATYQLTKARPRVLLQSSEPGDQGLFEAFLEPLGTLGYCGAVGLLPPGAAAPSGWAQAPLSDTAQVYMELQGLVDPQIQLPLLAARRYKLQKQLDSLTARTPSEGEAGTQRQQKLSSLQLELSKLDKAASHLRQLMDEPPAPGSPEL

SEQ ID NO: 101193 - protein, 221 aa, Homo sapiens
MLKSNGERRSRNALPAVYARKMAASQQQASAASSAAGVSGPSSAGGPGPQQQPQPPAQLVGPAQSGLLQQQQQDFDPVQRYKMLIPQLKESLQTLMKVAAQNLIQNTNIDNGQKSSDGPIQRFDKCLEEFYALCDQLELCLRLAHECLSQSCDSAKHSPTLVPTATKPDAVQPDSLPYPQYLAVIKAQISCAKDIHTALLDCANKVTGKTPAPPAGPGGTL

SEQ ID NO: 101194 - protein, 1274 aa, Homo sapiens
MDSQELKTLINYYCQERYFHHVLLVASEGIKRYGSDPVFRFYHAYGTLMEGKTQEALREFEAIKNKQDVSLCSLLALIYAHKMSPNPDREAILESDARVKEQRKGAGEKALYHAGLFLWHIGRHDKAREYIDRMIKISDGSKQGHVLKAWLDITRGKEPYTKKALKYFEEGLQDGNDTFALLGKAQCLEMRQNYSGALETVNQIIVNFPSFLPAFVKKMKLQLALQDWDQTVETAQRLLLQDSQNVEALRMQALYYVCREGDIEKASTKLENLGNTLDAMEPQNAQLFYNITLAFSRTCGRSQLILQKIQTLLERAFSLNPQQSEFATELGYQMILQGRVKEALKWYKTAMTLDETSVSALVGFIQCQLIEGQLQDADQQLEFLNEIQQSIGKSAELIYLHAVLAMKKNKRQEEVINLLNDVLDTHFSQLEGLPLGIQYFEKLNPDFLLEIVMEYLSFCPMQPASPGQPLCPLLRRCISVLETVVRTVPGLLQTVFLIAKVKYLSGDIEAAFNNLQHCLEHNPSYADAHLLLAQVYLSQEKVKLCSQSLELCLSYDFKVRDYPLYHLIKAQSQKKMGEIADAIKTLHMAMSLPGMKRIGASTKSKDRKTEVDTSHRLSIFLELIDVHRLNGEQHEATKVLQDAIHEFSGTSEEVRVTIANADLALAQGDIERALSILQNVTAEQPYFIEAREKMADIYLKHRKDKMLYITCFREIAERMANPRSFLLLGDAYMNILEPEEAIVAYEQALNQNPKDGTLASKMGKALIKTHNYSMAITYYEAALKTGQKNYLCYDLAELLLKLKWYDKAEKVLQHALAHEPVNELSALMEDGRCQVLLAKVYSKMEKLGDAITALQQARELQARVLKRVQMEQPDAVPAQKHLAAEICAEIAKHSVAQRDYEKAIKFYREALVHCETDNKIMLELARLYLAQDDPDSCLRQCALLLQSDQDNEAATMMMADLMFRKQDYEQAVFHLQQLLERKPDNYMTLSRLIDLLRRCGKLEDVPRFFSMAEKRNSRAKLEPGFQYCKGLYLWYTGEPNDALRHFNKARKDRDWGQNALYNMIEICLNPDNETVGGEVFENLDGDLGNSTEKQESVQLAVRTAEKLLKELKPQTVQGHVQLRIMENYCLMATKQKSNVEQALNTFTEIAASEKEHIPALLGMATAYMILKQTPRARNQLKRIAKMNWNAIDAEEFEKSWLLLADIYIQSAKYDMAEDLLKRCLRHNRSCCKAYEYMGYIMEKEQAYTDAALNYEMAWKYSNRTNPAVGFDCLM

SEQ ID NO: 101195 - protein, 152 aa, Homo sapiens
MDGTETRQRRLDSCGKPGELGLPHPLSTGGLPVASEDGALRAPESQSVTPKPLETEPSRETTWSIGLQVTVPFMFAGLGLSWAGMLLDYFQHWPVFVEVKDLLTLVPPLVGLKGNLEMTLASRLSTAANTGQIDDPQEQHRVISSNLALIQV

SEQ ID NO: 101196 - protein, 72 aa, Homo sapiens
MPGRGRCPDCGSTELVEDSHYSQSQLVCSDCGCVVTEGVLTTTFSDEGNLREVTYSRSTGENEQVSRSQQRE

SEQ ID NO: 101197 - protein, 192 aa, Homo sapiens
MAIRAQHSNAAQTQTGEANRGWTGQESLSDSDPEMWELLQREKDRQCRGLELIASENFCSRAALEALGSCLNNKYSEGYPGKRYYGGAEVVDEIELLCQRRALEAFDLDPAQWGVNVQPYSGSPANLAVYTALLQPHDRIMGLDLPDGGHLTHGYMSDVKRISATSIFFESMPYKLNGFSCLCVCPAQNWPH

SEQ ID NO: 101198 - protein, 240 aa, Homo sapiens
MVAGSDAGRALGVLSVVCLLHCFGFISCFSQQIYGVVYGNVTFHVPSNVPLKEVLWKKQKDKVAELENSEFRAFSSFKNRVYLDTVSGSLTIYNLTSSDEDEYEMESPNITDTMKFFLYVLESLPSPTLTCALTNGSIEVQCMIPEHYNSHRGLIMYSWDCPMEQCKRNSTSIYFKMENDLPQKIQCTLSNPLFNTTSSIILTTCIPSSGHSRHRYALIPIPLAVITTCIVLYMNGMYAF

SEQ ID NO: 101199 - protein, 152 aa, Homo sapiens
  MOD_RES (1)..(1): Any amino acid
XEILKEDESGSLKATIEDILFKAKRKRVFEHHGQVRLGMMRHLYVVVDGSRTMEDQDLKPNRLTCTLKLLEYFVEEYFDQNPISQIGIIVTKSKRAEKLTELSGNPRKHITSLKKAVDMTCHGEPSLYNSLSIAMQTLKRGFTVLARMVSIS

SEQ ID NO: 101200 - protein, 198 aa, Homo sapiens
MLLFFTLGLLIHFVFFASIFDIYFTSPLVHGMTPQFTPLPPPARRLVLFVADGLRADALYELDENGNSRAPFIRNIIMHEGSWGISHTRVPTESRPGHVALIAGFYEDVSAVAKGWKENPVEFDSLFNESKYTWSWGSPDILPMFAKGASGDHVYTYSYDAKREDFGAQDATKLDTWVFDNVKVCAIEWLIYKKHIFT

SEQ ID NO: 101201 - protein, 428 aa, Homo sapiens
MQLPRWWELGDPCAWTGQGRGTRRMSPATTGTFLLTVYSIFSKVHSDRNVYPSAGVLFVHVLEREYFKGEFPPYPKPGEISNDPITFNTNLMGYPDRPGWLRYIQRTPYSDGVLYGSPTAENVGKPTIIEITAYNRRTFETARHNLIINIMSAEDFPLPYQAEFFIKNMNVEEMLASEVLGDFLGAVKNVWQPERLNAINITSALDRGGRVPLPINDLKEGVYVMVGADVPFSSCLREVENPQNQLRCSQEMEPVITCDKKFRTQFYIDWCKISLVDKTKQVSTYQEVIRGEGILPDGGEYKPPSDSLKSRDYYTDFLITLAVPSAVALVLFLILAYIMCCRREGVIQLVHHSAIQKSTKELRDMSKNREIAWPLSTLPVFHPVTGEIIPPLHTDNYDSTNMPLMQTQQNLPHQTQIPQQQTTGKWYP

SEQ ID NO: 101202 - protein, 255 aa, Homo sapiens
MALNVAPVRDTKWLTLEVCRQFQRGTCSRSDEECKFAHPPKSCQVENGRVIACFDSLKGRCSRENCKYLHPPTHLKTQLEINGRNNLIQQKTAAAMLAQQMQFMFPGTPLHPVPTFPVGPAIGTNTAISFAPYLAPVTPGVGLVPTEILPTTPVIVPGSPPVTVPGSTATQKLLRTDKLEVCREFQRGNCARGETDCRFAHPADSTMIDTSDNTVTVCMDYIKGRCMREKCKYFHPPAHLQAKIKAAQPRPRPQS

SEQ ID NO: 101203 - protein, 1102 aa, Homo sapiens
MKEDYDTMGPEATIQTAINNGTVKNANCTSDFEEYFAKRKLEERDGHAVSIEEYLQRSDTAIIYPEAPEELSRLGTPEANGQEENDLPPGTPDAFAQLLTCPYCDRGYKRLTSLKEHIKYRHEKNEENFSCPLCSYTFAYRTQLERHMVTHKPGTDQHQMLTQGAGNRKFKCTECGKAFKYKHHLKEHLRIHSGEKPYECPNCKKRFSHSGSYSSHISSKKCIGLISVNGRMRNNIKTGSSPNSVSSSPTNSAITQLRNKLENGKPLSMSEQTGLLKIKTEPLDFNDYKVLMATHGFSGTSPFMNGGLGATSPLGVHPSAQSPMQHLGVGMEAPLLGFPTMNSNLSEVQKVLQIVDNTVSRQKMDCKAEEISKLKGYHMKDPCSQPEEQGVTSPNIPPVGLPVVSHNGATKSIIDYTLEKVNEAKACLQSLTTDSRRQISNIKKEKLRTLIDLVTDDKMIENHNISTPFSCQFCKESFPGPIPLHQHERYLCKMNEEIKAVLQPHENIVPNKAGVFVDNKALLLSSVLSEKGMTSPINPYKDHMSVLKAYYAMNMEPNSDELLKISIAVGLPQEFVKEWFEQRKVYQYSNSRSPSLERSSKPLAPNSNPPTKDSLLPRSPVKPMDSITSPSIAELHNSVTNCDPPLRLTKPSHFTNIKPVEKLDHSRSNTPSPLNLSSTSSKNSHSSSYTPNSFSSEELQAEPLDLSLPKQMKEPKSIIATKNKTKASSISLDHNSVSSSSENSDEPLNLTFIKKEFSNSNNLDNKSTNPVFSMNPFSAKPLYTALPPQSAFPPATFMPPVQTSIPGLRPYPGLDQMSFLPHMAYTYPTGAATFADMQQRRKYQRKQGFQGELLDGAQDYMSGLDDMTDSDSCLSRKKIKKTESGMYACDLCDKTFQKSSSLLRHKYEHTGKRPHQCQICKKAFKHKHHLIEHSRLHSGEKPYQCDKCGKRFSHSGSYSQHMNHRYSYCKREAEEREAAEREAREKGHLEPTELLMNRAYLQSITPQGYSDSEERESMPRDGESEKEHEKEGEDGYGKLGRQDGDEEFEEEEEESENKSMDTDPETIRDEEETGDHSMDDSSEDGKMETKSDHEEDNMEDGM

SEQ ID NO: 101204 - protein, 729 aa, Homo sapiens
MGGFLPKAEGPGSQLQKLLPSFLVREQDWDQHLDKLHMLQQKRILESPLLRASKENDLSVLRQLLLDCTCDVRQRGALGETALHIAALYDNLEAALVLMEAAPELVFEPTTCEAFAGQTALHIAVVNQNVNLVRALLTRRASVSARATGTAFRHSPRNLIYFGEHPLSFAACVNSEEIVRLLIEHGADIRAQDSLGNTVLHILILQPNKTFACQMYNLLLSYDGHGDHLQPLDLVPNHQGLTPFKLAGVEGNTVMFQHLMQKRRHIQWTYGPLTSILYDLTEIDSWGEELSFLELVVSSDKREARQILEQTPVKELVSFKWNKYGRPYFCILAALYLLYMICFTTCCVYRPLKFRGGNRTHSRDITILQQKLLQEAYETREDIIRLVGELVSIVGAVIILLLEIPDIFRVGASRYFGKTILGGPFHVIIITYASLVLVTMVMRLTNTNGEVVPMSFALVLGWCSVMYFTRGFQMLGPFTIMIQKMIFGDLMRFCWLMAVVILGFASAFYIIFQTEDPTSLGQFYDYPMALFTTFELFLTVIDAPANYDVDLPFMFSIVNFAFTIIATLLMLNLFIAMMGDTHWRVAQERDELWRAQVVATTVMLERKLPRCLWPRSGICGCEFGLGDRWFLRVENHNDQNPLRVLRYVEVFKNSDKEDDQEHPSEKQPSGAESGTLARASLALPTSSLSRTASQSSSHRGWEILRQNTLGHLNLGLNLSEGDGEEVYHF

SEQ ID NO: 101205 - protein, 816 aa, Homo sapiens
MDDLVCFEELTDYQLVSPAKNPSSLFSKEAPKRKAQAVSEEEEEEEGKSSSPKKKIKLKKSKNVATEGTSTQKEFEVKDPELEAQGDDMVCDDPEAGEMTSENLVQTAPKKKKNKGKKGLEPSQSTAAKVPKKAKTWIPEVHDQKADVSAWKDLFVPRPVLRALSFLGFSAPTPIQALTLAPAIRDKLDILGAAETGSGKTLAFAIPMIHAVLQWQKRNAAPPPSNTEAPPGETRTEAGAETRSPGKAEAESDALPDDTVIESEALPSDIAAEARAKTGGTVSDQALLFGDDDAGEGPSSLIREKPVPKQNENEEENLDKEQTGNLKQELDDKSATCKAYPKRPLLGLVLTPTRELAVQVKQHIDAVARFTGIKTAILVGGMSTQKQQRMLNRRPEIVVATPGRLWELIKEKHYHLRNLRQLRCLVVDEADRMVEKGHFAELSQLLEMLNDSQYNPKRQTLVFSATLTLVHQAPARILHKKHTKKMDKTAKLDLLMQKIGMRGKPKVIDLTRNEATVETLTETKIHCETDEKDFYLYYFLMQYPGRSLVFANSISCIKRLSGLLKVLDIMPLTLHACMHQKQRLRNLEQFARLEDCVLLATDVAARGLDIPKVQHVIHYQVPRTSEIYVHRSGRTARATNEGLSLMLIGPEDVINFKKIYKTLKKDEDIPLFPVQTKYMDVVKERIRLARQIEKSEYRNFQACLHNSWIEQAAAALEIELEEDMYKGGKADQQEERRRQKQMKVLKKELRHLLSQPLFTESQKTKYPTQSGKPPLLVSAPSKSESALSCLSKQKKKKTKKPKEPQPEQPQPSTSAN

SEQ ID NO: 101206 - protein, 421 aa, Homo sapiens
MPKGGCPKAPQQEELPLSSDMVEKQTGKKDKDKVSLTKTPKLERGDGGKEVRERASKRKLPFTAGANGEQKDSDTEKQGPERKRIKKEPVTRKAGLLFGMGLSGIRAGYPLSERQQVALLMQMTAEESANSPVDTTPKHPSQSTVCQKGTPNSASKTKDKVNKRNERGETRLHRAAIRGDARRIKELISEGADVNVKDFAGWTALHEACNRGYYDVAKQLLAAGAEVNTKGLDDDTPLHDAANNGHYKIAPPPSLAEPLKELFRQQEAVRGKLRLQHSIEREKLIVSCEQEILRVHCRAARTIANQAVPFSACTMLLDSEVYNMPLESQGDENKSVRDRFNARQFISWLQDVDDKYDRMKTCLLMRQQHEAAALNAVQRMEWQLKVQELDPAGHKSLCVNEVPSFYVPMVDVNDDFVLLPA

SEQ ID NO: 101207 - protein, 62 aa, Homo sapiens
MEAPEYLDLDEIDFSDDISYSVTSLKTIPELCRRCDTQNEDRSGKDSSVASSVYARTGHLVG

SEQ ID NO: 101208 - protein, 276 aa, Homo sapiens
MSRRKQAKPQHINSEEDQGEQQPQQQTPEFADAAPAAPAAGELGRSSLPSTFIRAPPTYVKVEVPGTFVGPSTLSPGMTPLLAAQPRRQAKQHGCTRCGKNFSSASALQIHERTHTGEKPFVCNICGRAFTTKGNLKVHYMTHGANNNSARRGRKLAIENTMALLGTDGKRVSEIFPKEILAPSVNVDPVVWNQYTSMLNGGLAVKTNEISVIQSGGVPTLPVSLGATSVVNNATVSKMDGSQSGISADVEKPSATDGVPKHQFPHFLEENKIAVS

SEQ ID NO: 101209 - protein, 322 aa, Homo sapiens
MNFSIFLQEMSLFKQQSPGKFCLLVCSVCTFFTILGSYIPGVILSYLLLLCAFLCPLFKCNDIGQKIYSKIKSVLLKLDFGIGEYINQKKRERSEADKEKSHKDDSELDFSALCPKISLTVAAKELSVSDTDVSEVSWTDNGTFNLSEGYTPQTDTSDDLDRPSEEVFSRDLSDFPSLENGMGTNDEDELSLGLPTELKRKKEQLDSGHRPSKETQSAAGLTLPLNSDQTFHLMSNLAGDVITAAVTAAIKDQLEGVQQALSQAAPIPEEDTDTEEGDDFELLDQSELDQIESELGLTQDQEAEAQQNKKSSGFLSNLLGGH

SEQ ID NO: 101210 - protein, 167 aa, Homo sapiens
MVGALCGCWFRLGGARPLIPLGPTVVQTSMSRSQVALLGLSLLLMLLLYVGLPGPPEQTSCLWGDPNVTVLAGLTPGNSPIFYREVLPLNQAHRVEVVLLHGKAFNSHTWEQLGTLQLLSQRGYRAVALDLPAHHAQRHDQQGSRGGAPIGDALPPVPAYPHCPAQA

SEQ ID NO: 101211 - protein, 240 aa, Homo sapiens
MLVIPPGLSEEEEALQKKFNKLKKKKKALLALKKQSSSSTTSQGGVKRSLSEQPVMDTATATEQAKQLVKSGAISAIKAETKNSGFKRSRTLEGKLKDPEKGPVPTFQPFQRSISADDDLQESSRRPQRKSLYESDRLRELGPDGEEAEGPGAGDGPPRSFDWGYEERSGAHSSASPPRSRSRDRSHERNRDRDRDRERDRDRDRDRDRERDRDRDRDRDRDRERDRDRERDRDRDREGP

SEQ ID NO: 101212 - protein, 409 aa, Homo sapiens
MVFKAKHLASQYWGCSRTMAGRRDPSLPYLEQYRIDASQFRELFASLTPWACGSHTPLLAGRMFRLLDENKDSLINFKEFVTGMSGMYHGDLTEKLKVLYKLHLPPALSPEEAESALEAAHYFTEDSSSEEALPQEEQEGSGSEERGEEKGTSSPDYRHYLRMWAKEKEAQKETIKDLPKMNQEQFIELCKTLYNMFSEDPMEQDLYHAIATVASLLLRIGEVGKKFSARTGRKPRDCATEEDEPPAPELHQDAARELQPPAAGDPQAKAGGDTHLGKAPQESQVVVEGGSGEGQGSPSQLLSDDETKDDMSMSSYSVVSTGSLQCEDLADDTVLVGGEACSPTARIGGTVDTDWCISFEQILASILTESVLVNFFEKRVDIGLKIKDQKKVERQFSTASDHEQPGVSG

SEQ ID NO: 101213 - protein, 138 aa, Homo sapiens
MKDLHSDDNEEESDEVEDNDNDSEMERPVNRGGSRSRRVSLSDGSDSESSSASSPLHHEPPPPLLKTNNNQILEVKSPIKQSKSDKQIKNGECDKIVNLIEETGHFHITNTTFDFDLCSLDKTTVRKLQSYLETSGTS

SEQ ID NO: 101214 - protein, 111 aa, Homo sapiens
MFKFHQMKHIFEILDKMRCLRKRSTVSFLGVLVIFLLFMNLYIEDSYVLEGDKQLIRETSTHQLNSERYVHTFKDLSNFSGAINVTYRYLAATPLQRKPHGLLFIIQRDGE

SEQ ID NO: 101215 - protein, 345 aa, Homo sapiens
MLPCFQLLRIGGGRGGDLYTFHPPAGAGCTYRLGHRADLCDVALRPQQEPGLISGIHAELHAEPRGDDWRVSLEDHSSQGTLVNNVRLPRGHRLELSDGDLLTFGPEGPPGTSPSEFYFMFQQVRVKPQDFAAITIPRSRGEARVGAGFRPMLPSQGAPQRPLSTFSPAPKATLILNSIGSLSKLRPQPLTFSPSWGGPKSLPVPAPPGEVGTTPSAPPQRNRRKSVHRVLAELDDESEPPENPPPVLMEPRKKLRVDKAPLTPTGNRRGRPRKYPVSAPMAPPAVGGGEPCAAPCCCLPQEETVAWVQCDGCDVWFHVACVGCSIQAAREADFRCPGCRAGIQT

SEQ ID NO: 101216 - protein, 704 aa, Homo sapiens
MGIRGLMSFVEDHSNEFFTDLKLRDTKIVIDGYALFHRLCFSSNLDLRYGGDYDSFADVVQKFFESLFACNICPYVVLDGGCDISDKKLTTLKDRAREKIQMAHSLSVGGSGYVCPLLIREVFIQVLIKLRVCFVQCFSEADRDIMTLANHWNCPVLSSDSDFCIFDLKTGFCPLNSFQWRNMNTIKGTQNYIPAKCFSLDAFCHHFSNMNKALLPLFAVLCGNDHVNLPIMETFLSKARLPLGATSSKGRRHHRILGLLNWLSHFANPTEALDNVLKYLPKKDRENVKELLCCSMEEYQQSQVKLQDFFQCGTYVCPDALNLGLPEWVLVALAKGQLSPFISDALVLRRTILPTQVENMQQPNAHRISQPIRQIIYGLLLNASPHLDKTSWNALPPQPLAFSEVERINKNIRTSIIDAVELAKDHSDLSRLTELSLRRRQMLLLETLKVKQTILEPIPTSLKLPIAVSCYWLQHTETKAKLHHLQSLLLTMLVGPLIAIINSPGKEELQEDGAKMLYAEFQRVKAQTRLGTRLDLDTAHIFCQWQSCLQMGMYLNQLLSTPLPEPDLTRPSAFNTLNEDIWTHTKYGGTLHVSRLYSGSLVHGLCQQLLASTSVESLLSICPEAKQLYEYLFNATRSYAPAEIFLPKGRSNSKKKRQKKQNTSCSKNRGRTTAHTKCWYEGNNRFGLLMVENLEEHSEASNIE

SEQ ID NO: 101217 - protein, 489 aa, Homo sapiens
MHPGVLAAFLFLSWTHCRALPLPSGGDEDDLSEEDLQFAERYLRSYYHPTNLAGILKENAASSMTERLREMQSFFGLEVTGKLDDNTLDVMKKPRCGVPDVGEYNVFPRTLKWSKMNLTYRIVNYTPDMTHSEVEKAFKKAFKVWSDVTPLNFTRLHDGIADIMISFGIKEHGDFYPFDGPSGLLAHAFPPGPNYGGDAHFDDDETWTSSSKGYNLFLVAAHEFGHSLGLDHSKDPGALMFPIYTYTGKSHFMLPDDDVQGIQSLYGPGDEDPNPKHPKTPDKCDPSLSLDAITSLRGETMIFKDRFFWRLHPQQVDAELFLTKSFWPELPNRIDAAYEHPSHDLIFIFRGRKFWALNGYDILEGYPKKISELGLPKEVKKISAAVHFEDTGKTLLFSGNQVWRYDDTNHIMDKDYPRLIEEDFPGIGDKVDAVYEKNESHSVTQAGVHCRNLSSLQPPPPGFKRFSCLSLWSSWDYRLYLFFQRTHTV

SEQ ID NO: 101218 - protein, 219 aa, Homo sapiens
MQGLLFSTLLLAGLAQFCCRVQGTGPLDTTPEGRPGEVSDAPQRKQFCHWPCKCPQQKPRCPPGVSLVRDGCGCCKICAKQPGEICNEADLCDPHKGLYCDYSVDRPRYETGVCAYLVAVGCEFNQVHYHNGQVFQPNPLFSCLCVSGAIGCTPLFIPKLAGSHCSGAKGGKKSDQSNCSLEPLLQQLSTSYKTMPDVCQASNLLPALRSLNCCLPSSL

SEQ ID NO: 101219 - protein, 248 aa, Homo sapiens
MEALCVCSLMPLHWSWILTASHLAAFFQGFRSLEDIRSQASLTTQQAIGLKHYSDFLERMPREEATEIEQTVQKAAQAFNSGLLCVACGSYRRGKATCGDVDVLITHPDGRSHRGIFSRLLDSLRQEGFLTDDLVSQEENGQQQKYLGVCRLPGPGRRHRRLDIIVVPYSEFACALLYFTGSAHFNRSMRALAKTKGMSLSEHALSTAVVRNTHGCKVGPGRVLPTPTEKDVFRLLGLPYREPAERDW

SEQ ID NO: 101220 - protein, 580 aa, Homo sapiens
MNISGSSCGSPNSADTSSDFKDLWTKLKECHDREVQGLQVKVTKLKQERILDAQRLEEFFTKNQQLREQQKVLHETIKVLEDRLRAGLCDRCAVTEEHMRKKQQEFENIRQQNLKLITELMNERNTLQEENKKLSEQLQQKIENDQQHQAAELECEEDVIPDSPITAFSFSGVNRLRRKENPHVRYIEQTHTKLEHSVCANEMRKVSKSSTHPQHNPNENEILVADTYDQSQSPMAKAHGTSSYTPDKSSFNLATVVAETLGLGVQEESETQGPMSPLGDELYHCLEGNHKKQPFEESTRNTEDSLRFSDSTSKTPPQEELPTRVSSPVFGATSSIKSGLDLNTSLSPSLLQPGKKKHLKTLPFSNTCISRLEKTRSKSEDSALFTHHSLGSEVNKIIIQSSNKQILINKNISESLGEQNRTEYGKDSNTDKHLEPLKSLGGRTSKRKKTEEESEHEVSCPQASFDKENAFPFPMDNQFSMNGDCVMDKPLDLSDRFSAIQRQEKSQGSETSKNKFRQVTLYEALKTIPKGFSSSRKASDGNCTLPKDSPGEPCSQECIILQPLNKCSPDNKPSLQIKEE

SEQ ID NO: 101221 - protein, 345 aa, Homo sapiens
MGPRARPALLLLMLLQTAVLQGRLLRSHSLHYLFMGASEQDLGLSLFEALGYVDDQLFVFYDHESRRVEPRTPWVSSRISSQMWLQLSQSLKGWDHMFTVDFWTIMENHNHSKESHTLQVILGCEMQEDNSTEGYWKYGYDGQDHLEFCPDTLDWRAAEPRAWPTKLEWERHKIRARQNRAYLERDCPAQLQQLLELGRGVLDQQEGSESSSLPGKVTTLRCRALNYYPQNITMKWLKDKQPMDAKEFEPKDVLPNGDGTYQGWITLAVPPGEEQRYTCQVEHPGLDQPLIVIWEPSPSGTLVIGVISGIAVFVVILFIGILFIILRKRQGSRGAMGHYVLAERE

SEQ ID NO: 101222 - protein, 1096 aa, Homo sapiens [sequence omitted]

SEQ ID NO: 101223 - protein, 157 aa, Homo sapiens
MSEPGKGDDCLELESSMAESRLRAPDLGVSRCLGKCQKNSPGARKHPFSGKSFYLDLPAGKNLQFLTGAIQQLGGVIEGFLSKEVSYIVSSRREVKAESSGKSHRGCPSPSPSEVRVETSAMVDPKGSHPRPSRKPVDSVPLSRGKELLQKAIRNQK

SEQ ID NO: 101224 - protein, 91 aa, Homo sapiens
MTDDKDVLRDVWFGRIPTCFTLYQDEITEREAEPYYTDLTSFGPSIGNSWNILQKKMDFVISPLEYIRQRLKDLSFRSCFVLWLQMDSCTH

SEQ ID NO: 101225 - protein, 406 aa, Homo sapiens
MSRDVCIHTWPCTYYLEPKRRWVTGQLSLTSLSLRFMTDSTGEILVSFPLSSIVEIKKEASHFIFSSITILEKGHAKHWFSSLRPSRNVVFSIIEHFWRELLLSQPGAVADASVPRTRGEELTGLMAGSQKRLEDTARVLHHQGQQLDSVMRGLDKMESDLEVADRLLTELESPAWWPFSSKLWKTPPETKPREDVSMTSCEPFGKEGILIKIPAVISHRTESHVKPGRLTVLVSGLEIHDSSSLLMHRFEREDVDDIKVHSPYEISIRQRFIGKPDMAYRLISAKMPEVIPILEVQFSKKMELLEDALVLRSARTSSPAEKSCSVWHAASGLMGRTLHREPPAGDQEGTALHLQTSLPALSEADTQELTQLIPGKSKAVCWAETVHFGSCSSVSTQGMGSPSLSL

SEQ ID NO: 101226 - protein, 45 aa, Homo sapiens
MATLKDQLIYNLLKEEQTPQNKITVVGVGAVGMACAISILMKTIM

SEQ ID NO: 101227 - protein, 101 aa, Homo sapiens
MASNKTTLQKMGKKQNGKSKKVEEAEPEEFVVEKVLDRRVVNGKVEYFLKWKGFTEKLAKKKMVQKENLYLTVNLMTANQRRKEMLLTNQEDLPEVLILKE

SEQ ID NO: 101228 - protein, 324 aa, Homo sapiens
MLGPAYNHTMETPASFLLVGIPGLQSSHLWLAISLSAMYIIALLGNTIIVTAIWMDSTRHEPMYCFLCVLAAVDIVMASSVVPKMVSIFCSGDSSISFSACFTQMFFVHLATAVETGLLLTMAFDRYVAICKPLHYKRILTPQVMLGMSMAITIRAIIAITPLSWMVSHLPFCGSNVVVHSYCEHIALARLACADPVPSSLYSLIGSSLMVGSDVAFIAASYILILKAVFGLSSKTAQLKALSTCGSHVGVMALYYLPGMASIYAAWLGQDVVPLHTQVLLADLYVIIPATLNPIIYGMRTKQLRERIWSYLMHVLFDHSNLGS

SEQ ID NO: 101229 - protein, 171 aa, Homo sapiens
MSSGNAKIGHPAPNFKATAVMPDGQFKDISLSDYKGKYVVFFFYPLDFTFVCPTEIIAFSDRAEEFKKLNCQVIGASVDSHFCHLAWVNTPKKQGGLGPMNIPLVSDPKRTIAQDYGVLKADEGISFRGLFIIDDKGILRQITVNDLPVGRSVDETLRLVQAFQFTDKHGE

SEQ ID NO: 101230 - protein, 38 aa, Homo sapiens
MASYPSGSGKPKAKYPFKKRASLQASTAAPGAVHPLTG

SEQ ID NO: 101231 - protein, 356 aa, Homo sapiens
MSRPLLITFTPATDPSDLWKDGQQQPQPEKPESTLDGAAARAFYEALIGDESSAPDSQRSQTEPARERKRKKRRIMKAPAAEAVAEGASGRHGQGRSLEAEDKMTHRILRAAQEGDLPELRRLLEPHEAGGAGGNINARDAFWWTPLMCAARAGQGAAVSYLLGRGAAWVGVCELSGRDAAQLAEEAGFPEVARMVRESHGETRSPENRSPTPSLQYCENCDTHFQDSNHRTSTAHLLSLSQGPQPPNLPLGVPISSPGFKLLLRRGWEPGMGLGPRGEGRANPIPTVLKRDQEGLGYRSAPQPRVTHFPAWDTRAVAGRERPPRVATLSWREERRREEKDRAWERDLRTYMNLEF

SEQ ID NO: 101232 - protein, 179 aa, Homo sapiens
MPPPRTGRGLLWLGLVLSSVCVALGSETQANSTTDALNVLLIIVDDLRPSLGCYGDKLVRSPNIDQLASHSLLFQNAFAQQAVCAPSRVSFLTGRRPDTTRLYDFNSYWRVHAGNFSTIPQYFKENGYVTMSVGKVFHPGTAPCPESGFSWFVVSESSIPILGMGLSLQSPLLAGRVPR

SEQ ID NO: 101233 - protein, 134 aa, Homo sapiens
MLSGGSDGVIVLYDLENSSRQSYYTCKAVCSIGRDHPDVHRYSVETVQWYPHDTGMFTSSSFDKTLKVWDTNTLQTADVFNFEETVYSHHMSPVSTKHCLVAVGTRGPKVQLCDLKSGSCSHILQGHRQEILAV

SEQ ID NO: 101234 - protein, 187 aa, Homo sapiens
MSKKDPNFLKVTIPPFHDPLKKAQYDKDNEKRTLLQCETGKIYSIKEFKEVEKVQLHSRFPQISNSRHFITPNEWLKLPTRYIESEFCRRRRLKVKVNFNDCSFDLKPLARAPYLLESQEEEKTVIYKNKGSSFLEREPLCYQEGNNPSAKEAISEGYFSSLSLSQEREEDQDGSPSPRLGLLKLEL

SEQ ID NO: 101235 - protein, 851 aa, Homo sapiens; identical to SEQ ID NO: 32762

SEQ ID NO: 101236 - protein, 262 aa, Homo sapiens
MAPEPAPGRTMVPLVPALVMLGLVAGAHGDSKPVFIKVPEDQTGLSGGVASFVCQATGEPKPRITWMKKGKKVSSQRFEVIEFDDGAGSVLRIQPLRVQRDEAIYECTATNSLGEINTSAKLSVLEEEQLPPGFPSIDMGPQLKVVEKARTATMLCAAGGNPDPEISWFKDFLPVDPATSNGRIKQLRSGALQIESSEESDQGKYECVATNSAGTRYSAPANLYVRGLAAWARSPMGIWSHPIRLLGVCACVCAHTGTLICV

SEQ ID NO: 101237 - protein, 147 aa, Homo sapiens
MAREDSVKCLRCLLYALNLLFWLMSISVLAVSAWMRDYLNNVLTLTAETRVEEAVILTYFPVVHPVMIAVCCFLIIVGMLGYCGTVKRNLLLLAWYFGSLLVIFCVELACGVWTYEQELMVPVQWSDMVTLKARMTNYGLPRYRWLT

SEQ ID NO: 101238 - protein, 84 aa, Homo sapiens
  MOD_RES (1)..(1): Any amino acid
XQEVKEAARLAREKSQDGGELTSPALGLASHQVPPSPLVSANGPGEEKLFRSQSADAPGPTERERLKKMLSEGWLSWRLRQLQR

SEQ ID NO: 101239 - protein, 278 aa, Homo sapiens
MDSTLTASEIRQRFIDFFKRNEHTYVHSSATIPLDDPTLLFANAGMNQFKPIFLNTIDPSHPMAKLSRAANTQKCIRAGGKHNDLDDVGKDVYHHTFFEMLGSWSFGDYFKELACKMALELLTQEFGIPIERLYVTYFGGDEAAGLEADLECKQIWQNLGLDDTKILPGNMKDNFWEMGDTGPCGPCSEIHYDRIGGRDAAHLVNQDDPNVLEIWNLVFIQYNREADGILKPLPKKSIDTGMGLERLVSVLQNKMSNYDTDLFVPYFEAIQKEPPWAR

SEQ ID NO: 101240 - protein, 46 aa, Homo sapiens
MADRFSRFNEDRDFQGNHFDQYEEGHLEIEQASLDKPIESQLAHIS

SEQ ID NO: 101241 - protein, 152 aa, Homo sapiens
MSRPLLITFTPATDPSDLWKDGQQQPQPEKPESTLDGAAALAFYEALIGDESSAPDSQRSQTEPARERKRKKRRIMKAPAAEAVAEGASGRHGQGRSLEAEDKMTHRILRAAQEGDLPELRRLLEPHEAGGAGGNINARDAFWWTPLMCAAR

SEQ ID NO: 101242 - protein, 200 aa, Homo sapiens
MAQALLVPPGPESFRLFTRESLAAIEKRAAEEKAKKPKKEQDNDDENKPKPNSDLEAGKNLPFIYGDIPPEMVSEPLEDLDPYYINKKTFIVMNKGKAIFRFSATSALYILTPLNPVRKIAIKILVHSLFSMLIMCTILTNCVFMTLSNPPDWTKNVEYTFTGIYTFESLIKILARGFCLEDFTFLRDPWNWLDFSVIVM

SEQ ID NO: 101243 - protein, 167 aa, Homo sapiens
MLFNLLLQALFLIQGMFVSLFPIHLVGQLVSLLHMSLLYSLYCFEYRWFNKGIEMHQRLSNIERNWPYYFGFGLPLAFLTAMQSSYIISGCLFSILFPLFIISANEAKTPGKAYLFQLRLFSLVVFLSNRLFHKTVYLQSALSSSTSAEKFPSPHPSPAKLKATAGH

SEQ ID NO: 101244 - protein, 513 aa, Homo sapiens [sequence omitted]

SEQ ID NO: 101245 - protein, 375 aa, Homo sapiens
MLLPEGQRQRALGFGTVTSTYSPVGQYIDAISNKQGELENYVSDGYKTALTEERRRFCFLVEKQCAVAKNSAAYHSKGKELLAQKLPLWQQACADPSKIPERAVQLMQQVASNGATLPSALSASKSNLVISDPIPGAKPLPVPPELAPFVGRMSAQESTPIMNGVTGPDGEDYSPWADRKAAQPKSLSPPQSQSKLSDSYSNTLPVRKSVTPKNSYATTENKTLPRSSSMAAGLERNGRMRVKAIFSHAAGDNSTLLSFKEGDLITLLVPEARDGWHYGESEKTKMRGWFPFSYTRVLDSDGSDRLHMSLQQGKSSSTGNLLDKDDLAIPPPDYGAASRAFPAQTASGFKQRPYSVAVPAFSQGLDDYGARSMSR

SEQ ID NO: 101246 - protein, 81 aa, Homo sapiens
MARGNQRELARQKNMKKTQEISKGKRKEDSLTASQRKQSSGGQKSESKMSAGPHLPLKAPRENPCFPLPAAGGSRFHSNLG

SEQ ID NO: 101247 - protein, 248 aa, Homo sapiens
MKQLPAATVRLLSSSQIITSVVSVVKELIENSLDAGATSVDVKLENYGFDKIEVRDNGEGIKAVDAPVMAMKYYTSKINSHEDLENLTTYGFRGEALGSICCIAEVLITTRTAADNFSTQYVLDGSGHILSQKPSHLGQGTTVTALRLFKNLPVRKQFYSTAKKCKDEIKKIQDLLMSFGILKPDLRIVFVHNKGEAVRLSRQLPMYLSKEDIQDIIYRMKHQFGNEIKECVHGRPFFHHLTYLPETT

SEQ ID NO: 101248 - protein, 387 aa, Homo sapiens
MSFRDLRNFTEMMRALGYPRHISMENFRTPNFGLVSEVLLWLVKRYEPQTDIPPDVDTEQDRVFFIKAIAQFMATKAHIKLNTKKLYQADGYAVKELLKITSVLYNAMKTKGMEGSEIVEEDVNKFKFDLGSKIADLKAARQLASEITSKGASLYDLLGMEVELREMRTEAIARPLEINETEKVMRIAIKEILTQVQKTKDLLNNVASDEANLEAKIEKRKLELERNRKRLETLQSVRPCFMDEYEKTEEELQKQYDTYLEKFQNLTYLEQQLEDHHRMEQERFEEAKNTLCLIQNKLKEEEKRLLKSGSNDDSDIDIQEDDESDSELEERRLPKPQTAMEMLMQGRPGKRIVGTMQGGDSDDNVSPPLPSVVLCTLGLAVPIDGSG

SEQ ID NO: 101249 - protein, 1059 aa, Homo sapiens
MVSSAQMGFNLQALLEQLSQDELSKFKYLITTFSLAHELQKIPHKEVDKADGKQLVEILTTHCDSYWVEMASLQVFEKMHRMDLSERAKDEVREAALKSFNKRKPLSLGITRKERPPLDVDEMLERFKTEAQETKGNVICLGKEVFKGKKPDKDNRCRYILKTKFREMWKSWPGDSKEVQVMAERYKMLIPFSNPRVLPGPFSYTVVLYGPAGLGKTTLAQKLMLDWAEDNLIHKFKYAFYLSCRELSRLGPCSFAELVFRDWPELQDDIPHILAQARKILFVIDGFDELGAAPGALIEDICGDWEKKKPVPVLLGSLLNRVMLPKAALLVTTRPRALRDLRILAEEPIYIRVEGFLEEDRRAYFLRHFGDEDQAMRAFELMRSNAALFQLGSAPAVCWIVCTTLKLQMEKGEDPVPTCLTRTGLFLRFLCSRFPQGAQLRGALRTLSLLAAQGLWAQTSVLHREDLERLGVQESDLRLFLDGDILRQDRVSKGCYSFIHLSFQQFLTALFYTLEKEEEEDRDGHTWDIGDVQKLLSGVERLRNPDLIQAGYYSFGLANEKRAKELEATFGCRMSPDIKQELLRCDISCKGGHSTVTDLQELLGCLYESQEEELVKEVMAQFKEISLHLNAVDVVPSSFCVKHCRNLQKMSLQVIKENLPENVTASESDAEVERSQDDQHMLPFWTDLCSIFGSNKDLMGLAINDSFLSASLVRILCEQIASDTCHLQRVVFKNISPADAHRNLCLALRGHKTVTYLTLQGNDQDDMFPALCEVLRHPECNLRYLGLVSCSATTQQWADLSLALEVNQSLTCVNLSDNELLDEGAKLLYTTLRHPKCFLQRLSLENCHLTEANCKDLAAVLVVSRELTHLCLAKNPIGNTGVKFLCEGLRYPECKLQTLVLWNCDITSDGCCDLTKLLQEKSSLLCLDLGLNHIGVKGMKFLCEALRKPLCNLRCLWLWGCSIPPFSCEDLCSALSCNQSLVTLDLGQNPLGSSGVKMLFETLTCSSGTLRTLRLKIDDFNDELNKLLEEIEEKNPQLIIDTEKHHPWAERPSSHDFMI

SEQ ID NO: 101250 - protein, 247 aa, Homo sapiens
MAETREEETVSAEASGFSDLSDSEFLEFLDLEDAQESKALVNMPGPSSESLGKDDKPISLQNWKRGLDILSPMERFHLKYLYVTDLATQNWCELQTAYGKELPGFLAPEKAAVLDTGASIHLARELELHDLVTVPVTTKEDAWAIKFLNILLLIPTLQSEGHIREFPVFGEGEGVLLVGVIDELHYTAKGELELAELKTRRRPMLPLEAQKKKDCFQVSLYKYIFDAMVQGKVTPASLIHHTKLCLE

SEQ ID NO: 101251 - protein, 88 aa, Homo sapiens
MTSSRLWFSLLLAAAFAGRATALWPWPQNFQTSDQRYVLYPNNFQFQYDVSSAAQPGCSVLDEAFQRYRDLLFGSGSWPRPYLTANMY

SEQ ID NO: 101252 - protein, 101 aa, Homo sapiens
MSEGVDLIDIYADEEFNQDPEFNNTDQIDLYDDVLTATSQPSDDRSSSTEPPPPVRQEPSPKPNNKTPAILYTYSGLRNRRAAVYVGSFSWVGLISERELS

SEQ ID NO: 101253 - protein, 244 aa, Homo sapiens
MDRGQHPPGWAWQWLSSHPATLHQLECSGAISVHCNLYLLGSSDSSAPASRVAETTGPESSVTAAPRARKYKCGLPQPCPEEHLAFRVVSGAANVIGPKICLEDKMLMSSVKDNVGRGLNIALVNGVSGELIEARAFDMWAGDVNDLLKFIRPLHEGTLVFVASYDDPATKMNEETRKLFSELGSRNAKELAFRDSWVFVGAKGVQNKSPFEQHVKNSKHSNKYEGWPEALEMEGCIPRRSTAS

SEQ ID NO: 101254 - protein, 275 aa, Homo sapiens
MDSTLTASEIRQRFIDFFKRNEHTYVHSSATIPLDDPTLLFANAGMNQFKPIFLNTIDPSHPMAKLSRAANTQKCIRAGGKHNDLDDVGKDVYHHTFFEMLGSWSFGDYFKELACKMALELLTQEFGIPIERLYVTYFGGDEAAGLEADLECKQIWQNLGLDDTKILPGNMKDNFWEMGDTGPCGPCSEIHYDRIGGRDAAHLVNQDDPNVLEIWNLVFIQYNRAQVPDHTLGKLVLRMPMGLTWPTGCWLTTLGPSLWHWLMVAGLTTQGVDMC

SEQ ID NO: 101255 - protein, 846 aa, Homo sapiens
MFRRARLSVKPNVRPGVGARGSTASNPQRGRESPRPPDPATDSASKPAEPTDVPTVDFGGAEPQEKAPRSSTEKTGGDNDVEESSRSSSTVSQRRKRISSTSSLVKSSVSVPSESHPLSTINQEAPQPTATSTKEKQPCSDRYRIYKAQKLREMLKEELRKEKKQWKNKYAINESQRPPDRSKMTMRDFIYYLPDNNPMTSSLEQEKKTEKPSTPVQTREQEGKSTPNAEDNEMEEETDDGPLLVPRVKVAEDGSIILDEESLTVEVLRTKGPCVVEENDPIFERGSTTTYSSFRKNYYSKPWSNKETDMFFLAISMVGTDFSMIGQLFPHRARIEIKNKFKREEKTNGWRIDKAFQEKRPFDFDFFAHLLQKVLAEEEKRKQKSVKNHSLKEKKSTKPRKNVKVKKVACEGVNNDPDESMSSRISDTERSQKDAQTVEEESLTLSREDAEQVALEVDLNQKKRRRKKQDGANELGVNNLLENATVQAGPSKGEKHKNKCQAIRPELKEGECSKEQMLSCTQNIDGIVGFASTEKVEKRTDPILSLSNQQDATSVATESSESSTSDLPSFEVGIRALCEVNNAEGSCIEERNVDLKNNSLEIDQTENVKPMLRGRFQRPKPNLSRAGKKSVLSQGKTESESKNSHSKTSVEKNHVEKDKMNTLDILRMETTERENPEAETVSVLGEKNCLQEGSQLKALRPVQVRGRLQKPKPNAGKAAERKEILISQEEIGANVEKNENESCADRDTPQHMEDQSRKDFEEEDVILQPEKNDSFQNVQPDEPKVLNECLSVQENNKANKLNQVPILRTRFQKPKPNIGRGTGRREISSKEEVLEKILSLGKWRQH

SEQ ID NO: 101256 - protein, 301 aa, Homo sapiens
MASPGCLWLLAVALLPWTCASRALQHLDPPAPLPLVIWHGMGDSCCNPLSMGAIKKMVEKKIPGIYVLSLEIGKTLMEDVENSFFLNVNSQVTTVCQALAKDPKLQQGYNAMGFSQGGQFLRAVAQRCPSPPMINLISVGGQHQGVFGLPRCPGESSHICDFIRKTLNAGAYSKVVQERLVQAEYWHDPIKEDVYRNHSIFLADINQERGINESYKKNLMALKKFVMVKFLNDSIVDPVDSEWFGFYRSGQAKETIPLQETSLYTQFCSLPRLECNGMISAHCNLRLPGSSEFSCLSLPSS

SEQ ID NO: 101257 - protein, 208 aa, Homo sapiens
MHWLRKVQGLCTLWGTQMSSRTLYINSRQLVSLQWGHQEVPAKFNFASDVLDHWADMEKAGKRLPSPALWWVNGKGKELMWNFRELSENSQQAANVLSGACGLQRGDRVAVVLPRVPEWWLVILGCIRAGLIFMPGTIQMKSTDILYRLQMSKAKAIVAGDEVIQEVDTVASECPSLRIKLLVSEKSCDGWLNFKKLLKYKVRHRDVK

SEQ ID NO: 101258 - protein, 224 aa, Homo sapiens
MRAPGAGAASVVSLALLWLLGLPWTWSAAAALGVYVGSGGWRFLRIVCKTARRDLFGLSVLIRVRLELRRHQRAGHTIPRIFQAVVQRQPERLALVDAGTGECWTFAQLDAYSNAVANLFRQLGFAPGDVVAIFLEGRPEFVGLWLGLAKAGMEAALLNVNLRREPLAFCLGTSGAKALIFGGEMVAGEARRGHQVGGDPGLAPGRAGRCCAPGLGRRPPWTWA

SEQ ID NO: 101259 - protein, 195 aa, Homo sapiens
MDNCLAAAALNGVDRRSLQRSARLALEVLERAKRRAVDWHALERPKGCMGVLAREAPHLEKQPAAGPQRVLPGEREERPPTLSASFRTMAEFMDYTSSQCGKYYSSVPEEGGATHVYRYHRGESKLHMCLDIGNGQRKDRKKTSLGPGGSYQISEHAPEASQPVSTELLTHWVSPPLQLHEPVDMVLRGLFELSL

SEQ ID NO: 101260 - protein, 255 aa, Homo sapiens
MILNKALLLGALALTAVMSPCGGEDIVADHVASYGVNFYQSHGPSGQYTHEFDGDEEFYVDLETKETVWQLPMFSKFISFDPQSALRNMAVGKHTLEFMMRQSNSTAATNEVPEVTVFSKFPVTLGQPNTLICLVDNIFPPVVNITWLSNGHSVTEGVSETSFLSKSDHSFFKISYLTFLPSADEIYDCKVEHWGLDEPLLKHWEPEIPAPMSELTETLVCALGLSVGLMGIVVGTVFIIQGLRSVDASRHQGLL

SEQ ID NO: 101261 - protein, 571 aa, Homo sapiens
MVIDKLPFDKYELEPSPLTQFILERKSPQTCWQVYVSNSAKYSELGHPFGYLKASTALNCVNLFVMPYNYPVLLPLLDDLFKVHKAKPTLKWRQSFESYLKTMPPYYLGPLKKAVRMMGAPNLIADSMEYGLSYSVISYLKKLSQQAKIESDRVIGSVGKKVVQETGIKVRSRSHGLSMAYRKDFQQLLQGISEDVPHRLLDLNMKEYTGFQVALLNKDLKPQTFRNAYDIPRRNLLDHLTRMRSNLLKSTRRFLKGQDEDQVHSVPIAQMGNYQEYLKQVPSPLRELDPDQPRRLHTFGNPFKLDKKGMMIDEADEFVAGPQNKHKRPGEPNMQGIPKRRRCMSPLLRGRQQNPVVNNHIGGKGPPAPTTQAQPDLIKPLPLHKISETTNDSIIHDVVENHVADQLSSDITPNAMDTEFSASSPASLLERPTNHMEALGHDHLGTNDLTVGGFLENHEEPRDKEQCAEENIPASSLNKGKKLMHCRSHEEVNTELKAQIMKEIRKPGRKYERIFTLLKHVQGSLQTRLIFLQNVIKEASRFKKRMLIEQLENFLDEIHRRANQINHINSN

SEQ ID NO: 101262 - protein, 15 aa, Homo sapiens
  MOD_RES (1)..(1): Any amino acid
XTPTQNNIFKSSRRG

SEQ ID NO: 101263 - protein, 600 aa, Homo sapiens
MKNAVIGNNKQKANLIVLGAVPRLLYLLQQETSSTELKTECAVVLGSLAMGTENNVKSLLDCHIIPALLQGLLSPDLKFIEACLRCLRTIFTSPVTPEELLYTGPDHQTILFNHGAVQNIAHLLTSLSYKVRMQALKCFSVLAFENPQVSMTLVNVLVDGELLPQIFVKMLQRDKPIEMQLTSAKCLTYMCRAGAIRTDDNCIVLKTLPCLVRMCSKERLLEERVEGAETLAYLIEPDVELQRIASITDHLIAMLADYFKYPSSVSAITDIKRLDHDLKHAHELRQAAFKLYASLGANDEDIRKKIIETENMMDRIVTGLSESSVKVRLAAVRCLHSLSRSVQQLRTSFQDHAVWKPLMKVLQNAPDEILVVASSMLCNLLLEFSPSKEPILESGAVELLCGLTQSENPALRVNGIWALMNMAFQAEQKIKADILRSLSTEQLFRLLSDSDLNVLMKTLGLLRNLLSTRPHIDKIMSTHGKQIMQAVTLILEGEHNIEVKEQTLCILANIADGTTAKDLIMTNDDILQKIKYYMGHSHVKLQLAAMFCISNLIWNEEEGSQERQDKLRDMGIVDILHKLSQSPDSNLCDKAKMALQQYLA

SEQ ID NO: 101264 - protein, 1267 aa, Homo sapiens
MLVGQGAGPLGPAVVTAAVVLLLSGVGPAHGSEDIVVGCGGFVKSDVEINYSLIEIKLYTKHGTLKYQTDCAPNNGYFMIPLYDKGDFILKIEPPLGWSFEPTTVELHVDGVSDICTKGGDINFVFTGFSVNGKVLSKGQPLGPAGVQVSLRNTGTEAKIQSTVTQPGGKFAFFKVLPGDYEILATHPTWALKEASTTVRVTNSNANAASPLIVAGYNVSGSVRSDGEPMKGVKFLLFSSLVTKEDVLGCNVSPVPGFQPQDESLVYLCYTVSREDGSFSFYSLPSGGYTVIPFYRGERITFDVAPSRLDFTVEHDSLKIEPVFHVMGFSVTGRVLNGPEGDGVPEAVVTLNNQIKVKTKADGSFRLENITTGTYTIHAQKEHLYFETVTIKIAPNTPQLADIVATGFSVCGQISIIRFPDTVKQMNKYKVVLSSQDKDKSLVTVETDAHGSFCFKANPGTYKVQVMVPEAETRAGLTLKPQTFPLTVTDRPVMDVAFVQFLASVSGKVSCLDTCGDLLVTLQSLSRQGEKRSLQLSGKVNAMTFTFDNVLPGKYKISIMHEDWCWKNKSLEVEVLEDDVSAVEFRQTGYMLRCSLSHAITLEFYQDGNGRENVGIYNLSKGVNRFCLSKPGVYKVTPRSCHRFEQAFYTYDTSSPSILTLTAIRHHVLGTITTDKMMDVTVTIKSSIDSEPALVLGPLKSVQELRREQQLAEIEARRQEREKNGNEEGEERMTKPPVQEMVDELQGPFSYDFSYWARSGEKITVTPSSKELLFYPPSMEAVVSGESCPGKLIEIHGKAGLFLEGQIHPELEGVEIVISEKGASSPLITVFTDDKGAYSVGPLHSDLEYTVTSQKEGYVLTAVEGTIGDFKAYALAGVSFEIKAEDDQPLPGVLLSLSGGLFRSNLLTQDNGILTFSNLSPGQYYFKPMMKEFRFEPSSQMIEVQEGQNLKITITGYRTAYSCYGTVSSLNGEPEQGVAMEAVGQNDCSIYGEDTVTDEEGKFRLRGLLPGCVYHVQLKAEGNDHIERALPHHRVIEVGNNDIDDVNIIVFRQINQFDLSGNVITSSEYLPTLWVKLYKSENLDNPIQTVSLGQSLFFHFPPLLRDGENYVVLLDSTLPRSQYDYILPQVSFTAVGYHKHITLIFNPTRKLPEQDIAQGSYIALPLTLLVLLAGYNHDKLIPLLLQLTSRLQGVGALGQAASDNSGPEDAKRQAKKQKTRRTLRLQEEFQLMWCLVPWRGTLGIHLFSSLPFASEILLETTATCIHY

SEQ ID NO: 101265 - protein, 243 aa, Homo sapiens
MKFKNPPVNSLSLEFLTELVISLEKLENDKSFRGVILTSDRPGVFSAGLDLTEMCGRSPAHYAGYWKAVQELWLRLYQSNLVLVSAINGACPAGGCLVALTCDYRILADNPRYCIGLNETQLGIIAPFWLKDTLENTIGHRAAERALQLGLLFPPAEALQVGIVDQVVPEEQVQSTALSAIAQWMAIPDHARQLTKAMMRKATASRLVTQRDADVQNFVSFISKDSIQKSLQMYLERLKEEKG

SEQ ID NO: 101266 - protein, 131 aa, Homo sapiens
MWTFVTQLLVTLVLLSFFLVSCQNVMHIVRGSLCFVLKHIHQELDKELGESEGLSDDEETISTRVVRRRVFLKGNEFQNIPGEQVTEEQFTDEQGNIVTKKIIRKVVRQIDLSSADAAQEHEEDHTSTPNP

SEQ ID NO: 101267 - protein, 55 aa, Homo sapiens
MPKRKVSSAEGAAKEEPKRRSARLSAKPPAKVEAKPKKAAAKSQDSTEARRKGTL

SEQ ID NO: 101268 - protein, 109 aa, Homo sapiens
MEDSGKTFSSEEEEANYWKDLAMTYKQRAENTQEELREFQEGSREYEAELETQLQQIETRNRDLLSENNRLRMELETIKVPRRSLNRQCSRWSPLAASSWSLRLNLGEV

SEQ ID NO: 101269 - protein, 3936 aa, Homo sapiens
MTTMLQKSDSNASFLRAARAGNLDKVVEYLKGGIDINTCNQNGLNALHLAAKEGHVGLVQELLGRGSSVDSATKKGNTALHIASLAGQAEVVKVLVKEGANINAQSQNGFTPLYMAAQENHIDVVKYLLENGANQSTATEDGFTPLAVALQQGHNQAVAILLENDTKGKVRLPALHIAARKDDTKSAALLLQNDHNADVQSKMMVNRTTESGFTPLHIAAHYGNVNVATLLLNRGAAVDFTARNGITPLHVASKRGNTNMVKLLLDRGGQIDAKTRDGLTPLHCAARSGHDQVVELLLERGAPLLARTKNGLSPLHMAAQGDHVECVKHLLQHKAPVDDVTLDYLTALHVAAHCGHYRVTKLLLDKRANPNARALNGFTPLHIACKKNRIKVMELLVKYGASIQAITESGLTPIHVAAFMGHLNIVLLLLQNGASPDVTNIRGETALHMAARAGQVEVVRCLLRNGALVDARAREEQTPLHIASRLGKTEIVQLLLQHMAHPDAATTNGYTPLHISAREGQVDVASVLLEAGAAHSLATKKGFTPLHVAAKYGSLDVAKLLLQRRAAADSAGKNGLTPLHVAAHYDNQKVALLLLEKGASPHATAKNGYTPLHIAAKKNQMQIASTLLNYGAETNIVTKQGVTPLHLASQEGHTDMVTLLLDKGANIHMSTKSGLTSLHLAAQEDKVNVADILTKHGADQDAHTKLGYTPLIVACHYGNVKMVNFLLKQGANVNAKTKNGYTPLHQAAQQGHTHIINVLLQHGAKPNATTANGNTALAIAKRLGYISVVDTLKVVTEEVTTTTTTITEKHKLNVPETMTEVLDVSDEEGDDTMTGDGGEYLRPEDLKELGDDSLPSSQFLDGMNYLRYSLEGGRSDSLRSFSSDRSHTLSHASYLRDSAVMDDSVVIPSHQVSTLAKEAERNSYRLSWGTENLDNVALSSSPIHSGFLVSFMVDARGGAMRGCRHNGLRIIIPPRKCTAPTRVTCRLVKRHRLATMPPMVEGEGLASRLIEVGPSGAQFLGKLHLPTAPPPLNEGESLVSRILQLGPPGTKFLGPVIVEIPHFAALRGKERELVVLRSENGDSWKEHFCDYTEDELNEILNGMDEVLDSPEDLEKKRICRIITRDFPQYFAVVSRIKQDSNLIGPEGGVLSSTVVPQVQAVFPEGALTKRIRVGLQAQPMHSELVKKILGNKATFSPIVTLEPRRRKFHKPITMTIPVPKASSDVMLNGFGGDAPTLRLLCSITGGTTPAQWEDITGTTPLTFVNECVSFTTNVSARFWLIDCRQIQESVTFASQVYREIICVPYMAKFVVFAKSHDPIEARLRCFCMTDDKVDKTLEQQENFAEVARSRDVEVLEGKPIYVDCFGNLVPLTKSGQHHIFSFFAFKENRLPLFVKVRDTTQEPCGRLSFMKEPKSTRGLVHQAICNLNITLPIYTKESESDQEQEEEIDMTSEKNDETESTETSVLKSHLVNEVPVLASPDLLSEVSEMKQDLIKMTAILTTDVSDKAGSIKVKELVKAAEEEPGEPFEIVERVKEDLEKVNEILRSGTCTRDESSVQSSRSERGLVEEEWVIVSDEEIEEARQKAPLEITEYPCVEVRIDKEIKGKVEKDSTGLVNYLTDDLNTCVPLPKEQLQTVQDKAGKKCEALAVGRSSEKEGKDIPPDETQSTQKQHKPSLGIKKPVRRKLKEKQKQKEEGLQASAEKAELKKGSSEESLGEDPGLAPEPLPTVKATSPLIEETPIGSIKDKVKALQKRVEDEQKGRSKLPIRVKGKEDVPKKTTHRPHPAASPSLKSERHAPGSPSPKTERHSTLSSSAKTERHPPVSPSSKTEKHSPVSPSAKTERHSPASSSSKTEKHSPVSPSTKTERHSPVSSTKTERHPPVSPSGKTDKRPPVSPSGRTEKHPPVSPGRTEKRLPVSPSGRTDKHQPVSTAGKTEKHLPVSPSGKTEKQPPVSPTSKTERIEETMSVRELMKAFQSGQDPSKHKTGLFEHKSAKQKQPQEKGKVRVEKEKGPILTQREAQKTENQTIKRGQRLPVTGTAESKRGVRVSSIGVKKEDAAGGKEKVLSHKIPEPVQSVPEEESHRESEVPKEKMADEQGDMDLQISPDRKTSTDFSEVIKQELEDNDKYQQFRLSEETEKAQLHLDQVLTSPFNTTFPLDYMKDEFLPALSLQSGALDGSSESLKNEGVAGSPCGSLMEGTPQISSEESYKHEGLAETPETSPESLSFSPKKSEEQTGETKESTKTETTTEIRSEKEHPTTKDITGGSEERGATVTEDSETSTESFQKEATLGSPKDTSPKRQDDCTGSCSVALAKETPTGLTEEAACDEGQRTFGSSAHKTQTDSEVQESTATSDETKALPLPEASVKTDTGTESKPQGVIRSPQGLELALPSRDSEVLSAVADDSLAVSHKDSLEASPVLEDNSSHKTPDSLEPSPLKESPCRDSLESSPVEPKMKAGIFPSHFPLPAAVAKTELLTEVASVRSRLLRDPDGSAEDDSLEQTSLMESSGKSPLSPDTPSSEEVSYEVTPKTTDVSTPKPAVIHECAEEDDSENGEKKRFTPEEEMFKMVTKIKMFDELEQEAKQKRDYKKEPKQEESSSSSDPDADCSVDVDEPKHTGSGEDESGVPVLVTSESRKVSSSSESEPELAQLKKGADSGLLPEPVIRVQPPSPLPSSMDSNSSPEEVQFQPVVSKQYTFKMNEDTQEEPGKSEEEKDSESHLAEDRHAVSTEAEDRSYDKLNRDTDQPKICDGHGCEAMSPSSSAAPVSSGLQSPTGDDVDEQPVIYKESLALQGTHEKDTEGEELDVSRAESPQADCPSESFSSSSSLPHCLVSEGKELDEDISATSSIQKTEVTKTDETFENLPKDCPSQDSSITTQTDRFSMDVPVSDLAENDEIYDPQITSPYENVPSQSFFSSEESKTQTDANHTTSFHSSEVYSVTITSPVEDVVVASSSSGTVLSKESNFEGQDIKMESQQESTLWEMQSDSVSSSFEPTMSATTTVVGEQISKVIITKTDVDSDSWSEIREDDEAFEARVKEEEQKIFGLMVDRQSQGTTPDTTPARTPTEEGTPTSEQNPFLFQEGKLFEMTRSGAIDMTKRSYADESFHFFQIGQESREETLSEDVKEGATGADPLPLETSAESLALSESKETVDDEADLLPDDVSEEVEEIPASDAQLNSQMGISASTETPTKEAVSVGTKDLPTVQTGDIPPLSGVKQISCPDSSEPAVQVQLDFSTLTRSVYSDRGDDSPDSSPEEQKSVIEIPTAPMENVPFTESKSKIPVRTMPTSTPAPPSAEYESSVSEDFLSSVDEENKADEAKPKSKLPVKVPLQRVEQQLSDLDTSVQKTVAPQGQDMASIAPDNRSKSESDASSLDSKTKCPVKTRSYTETETESRERAEELELESEEGATRPKILTSRLPVKSRSTTSSCRGGTSPTKESKEHFFDLYRNSIEFFEEISDEASKLVDRLTQSEREQEIVSDDESSSALEVSVIENLPPVETEHSVPEDIFDTRPIWDESIETLIERIPDENGHDHAEDPQDEQERIEERLAYIADHLGFSWTELARELDFTEEQIHQIRIENPNSLQDQSHALLKYWLERDGKHATDTNLVECLTKINRMDIVHLMETNTEPLQERISHSYAEIEQTITLDHSEGFSVLQEELCTAQHKQKEEQAVSKESETCDHPPIVSEEDISVGYSTFQDGVPKTEGDSSATALFPQTHKEQVQQDFSGKMQDLPEESSLEYQQEYFVTTPGTETSETQKAMIVPSSPSKTPEEVSTPAEEEKLYLQTPTSSERGGSPIIQEPEEPSEHREESSPRKTSLVIVESADNQPETCERLDEDAAFEKGDDMPEIPPETVTEEEYIDEHGHTVVKKVTRKIIRRYVSSEGTEKEEIMVQGMPQEPVNIEEGDGYSKVIKRVVLKSDTEQSEDNNE

SEQ ID NO: 101270 - protein, 260 aa, Homo sapiens
MKDRTQELRTAKDSDDDDDVAVTVDRDRFMDEFFEQVEEIRGFIDKIAENVEEVKRKHSAILASPNPDEKTKEELEELMSDIKKTANKVRSKLKSIEQSIEQEEGLNRSSADLRIRKTQHSTLSRKFVEVMSEYNATQSDYRERCKGRIQRQLEITGRTTTSEELEDMLESGNPAIFASGIIMDSSISKQALSEIETRHSEIIKLENSIRELHDMFMDMAMLVESQPQGAFLKSCPEPQPNPEEGALWSSGAPGPAGRDD

SEQ ID NO: 101271 - protein, 574 aa, Homo sapiens
MSQNGYFEDSSYYKCDTDDTFEAREEILGDEAFDTANSSIVSGESIRFFVNVNLEMQATNTENEATSGGCVLLHTSRKYLKLKNFKEEIRAHRDLDGFLAQASIVLNETATSLDNVLRTMLRRFARDPDNNEPNCNLDLLMAMLFTDAGAPMRGKVHLLSDTIQGVTATVTGVRYQQSWLCIICTMKALQKRHVCISRLVRPQNWGENSCEVRFVILVLAPPKMKSTKTAMEVARTFATMFSDIAFRQKLLETRTEEEFKEALVHQRQLLTMVSHGPVAPRTKERSTVSLPAHRHPEPPKCKDFVPFGKGIREDIARRFPLYPLDFTDGIIGKNKAVGKYITTTLFLYFACLLPTIAFGSLNDENTDGAIDVQKTIAGQSIGGLLYALFSGQPLVILLTTAPLALYIQVIRVICDDYDLDFNSFYAWTGLWNSFFLALYAFFNLSLVMSLFKRSTEEIIALFISITFVLDAVKGTVKTCQASAPASTPASTLPSTPASSPAPRSCPRPHTQARRPPCSASSSCWARSGWATPSTNSRRAPTCTPACERSCPTAPCPSRCSPSPSSAPMASGKSR

SEQ ID NO: 101272 - protein, 183 aa, Homo sapiens
MLQQTWTSRCLMKFYAVVATSPASWESHKIAERIEQRILNSNPVMEAFGNACTLRNNNSSRFGKFIQLQLNRAQQMTGAAVQTYLLEKTRVACQASSERNFHIFYQICKGASEDERLQWHLPEGAAFSWLPNPERSLEEDCFEVTREAMLHLGIDTPTQNNIFKVRRKATPLKFGRDDGQPFA

SEQ ID NO: 101273 - protein, 57 aa, Homo sapiens
MAQRNLYRDVMLENYRNLVFLGIVVSKPDLITHLEQGKKPSTMQRHEMVANPSGRCE

SEQ ID NO: 101274 - protein, 227 aa, Homo sapiens
MGDRCQEECPFGSFGFQCSQHCDCHNGGQCSPTTGACECEPGYKGPRCQERLCPEGLHGPGCTLPCPCDADNTISCHPVTGACTCQPGWSGHHCNESCPVGYYGDGCQLPCTCQNGADCHSITGGCTCAPGFMGEVCAVSCAAGTYGPNCSSICSCNNGGTCSPVDGSCTCKEGWQGLDCTLPCPSGTWGLNCNESCTCANGAACSPIDGSCSCTPGWLGDTCELPC

SEQ ID NO: 101275 - protein, 63 aa, Homo sapiens
VSMTPEIERVRRNQEQLSAGMNCVSRKFGTVLLYLSCVCLFKRSSLSTQMYWALSWSPRHKDG

SEQ ID NO: 101276 - protein, 29 aa, Homo sapiens
  MOD_RES (1)..(1): Any amino acid
XMKLDLEDPNLDLNVFMSQEVLPAATSIL

SEQ ID NO: 101277 - protein, 557 aa, Homo sapiens
MSTERTSWTSLSTIQKIALGLGIPASATVAYILYRRYRESREERLTFVGEDDIEIEMRVPQEAVKLIIGRQGANIKQTGARIDVDTEDVGDERVLLISGFPVQVCKAKAAIHQILTENTPVSEQLSVPQRSVGRIIGRGGETIRSICKASGAKITCDKESEGTLLLSRLIKISGTQKEVAAAKHLILEKVSEDEELRKRIAHSAETRVPRKQPISVRREDMTEPGGAGEPALWKNTSSSMEPTAPLVTPPPKGGGDMAVVVSKEGSWEKPSDDSFQKSEAQAIPEMPMFEIPSPDFSFHADEYLEVYVSASEHPNHFWIQIVGSRSLQLDKLVNEMTQHYENSVPEDLTVHVGDIVAAPLPTNGSWYRARVLGTLENGNLDLYFVDFGDNGDCPLKDLRALRSDFLSLPFQAIECSLARIAPSGDQWEEEALDEFDRLTHCADWKPLVAKISSYVQTGISTWPKIYLYDTSNGKKLDIGLELVHKGYAIELPEDIEENRAVPDMLKDMATETDASLSTLLTETKKSSGEITHTLSCLSLSEAASMSGDDNLEDDYLL

SEQ ID NO: 101278 - protein, 185 aa, Homo sapiens
MQAIKAVGKTCLLISYTTNAFPGEYIPTVFDNYSANVMVDSKPVNLGLWDTAGQEDYDRLRPLSYPQTDVFLICFSLVSPASYENVRAKWFPEVRHHCPSTPIILVGTKLDLRDDKDTIEKLKEKKLAPITYPQGLALAKEIDSVKYLECSALTQRGLKTVFDEAIRAVLCPQPTRQQKRACSLL

SEQ ID NO: 101279 - protein, 186 aa, Homo sapiens
MMYPVRGTEGSTVLCVSKMEADLSGFNIDAPRWDQRTFLGRVKHFLNITDPRTVFVSERELDWAKVMVEKSRMGVVPPGTQVEQLLYAKKLYDSAFHPDTGEKMNVIGRMSFQLPGGMIITGFMLQFYRTMPAVIFWQWVNQSFNALVNYTNRNAASPTSVRKRRPWWAAGCPLPLWLRLTVSISP

SEQ ID NO: 101280 - protein, 185 aa, Homo sapiens
VCKPVEETQRPPTLQEIKQKIDSYNTREKNCLGMKLSEDGTYTGFIKVHLKLRRPVTVPAGIRPQSIYDAIKEVNLAATTDKRTSFYLPLDAIKQLHISSTTTVSEVIQGLLKKFMVVDNPQKFALFKRIHKDGQVLFQKLSIADRPLYLRLLAGPDTEVLSFVLKENETGEVEVGLDPLCKPRP

SEQ ID NO: 101281 - protein, 264 aa, Homo sapiens
MALQIPGGFWAAAVTVMLVMLSTPVAEARDFPKDFLVQFKGMCYFTNGTERVRGVARYIYNREEYGRFDSDVGEFQAVTELGRSIEDWNNYKDFLEQERAAVDKVCRHNYEAELRTTLQRQVEPTVTISPSRTEALNHHNLLVCSVTDFYPAQIKVRWFRNDQEETAGVVSTSLIRNGDWTFQILVMLEITPQRGDIYTCQVEHPSLQSPITVEWRAQSESAQSKMLSGIGGFVLGLIFLGLGLIIRHRGQKGPRGPPPAGLLH

SEQ ID NO: 101282 - protein, 1461 aa, Homo sapiens
MSIAIPLGVTTSDTSYSDMAAGSDPESVEASPAVNEKSVYSTHNYGTTQRHGCRGLPYADHNYGAPPPPTPPASPPVQTIIPRSDLNGLPSPVEERCGDSPNSEGETVPTWCPCGLSQDGFLLNCDKCRGMSRGKVIRLHRRKQDNISGGDSSATESWDEELSPSTVLYTATQHTPTSITLTVRRTKPKKRKKSPEKGRAAPKTKKIKNSPSEAQNLDENTTEGWENRIRLWTDQYEEAFTNQYSADVQNALEQHLHSSKEFVGKPTILDTINKTELACNNTVIGSQMQLQLGRVTRVQKHRKILRAARDLALDTLIIEYRGKVMLRQQFEVNGHFFKKPYPFVLFYSKFNGVEMCVDARTFGNDARFIRRSCTPNAEVRHMIADGMIHLCIYAVSAITKDAEVTIAFDYEYSNCNYKVDCACHKGNRNCPIQKRNPNATELPLLPPPPSLPTIGAETRRRKARRKELEMEQQNEASEENNDQQSQEVPEKVTVSSDHEEVDNPEEKPEEEKEEVIDDQENLAHSRRTREDRKVEAIMHAFENLEKRKKRRDQPLEQSNSDVEITTTTSETPVGEETKTEAPESEVSNSVSNVTIPSTPQSVGVNTRRSSQAGDIAAEKLVPKPPPAKPSRPRPKSRISRYRTSSAQRLKRQKQANAQQAELSQAALEEGGSNSLVTPTEAGSLDSSGENRPLTGSDPTVVSITGSHVNRAASKYPKTKKYLVTEWLNDKAEKQECPVECPLRITTDPTVLATTLNMLPGLIHSPLICTTPKHYIRFGSPFIPERRRRPLLPDGTFSSCKKRWIKQALEEGMTQTSSVPQETRTQHLYQSNENSSSSSICKDNADLLSPLKKWKSRYLMEQNVTKLLRPLSPVTPPPPNSGSKSPQLATPGSSHPGEEECRNGYSLMFSPVTSLTTASRCNTPLQFELCHRKDLDLAKVGYLDSNTNSCADRPSLLNSGHSDLAPHPSLGPTSETGFPSRSGDGHQTLVRNSDQAFRTEFNLMYAYSPLNAMPRADGLYRGSPLVGDRKPLHLDGGYCSPAEGFSSRYEHGLMKDLSRGSLSPGGERACEGVPSAPQNPPQRKKVSLLEYRKRKQEAKENSAGGGGDSAQSKSKSAGAGQGSSNSVSDTGAHGVQGSSARTPSSPHKKFSPSHSSMSHLEAVSPSDSRGTSSSHCRPQENISSRWMVPTSVERLREGGSIPKVLRSSVRVAQKGEPSPTWESNITEKDSDPADGEGPETLSSALSKGATVYSPSRYSYQLLQCDSPRTESQSLLQQSSSPFRGHPTQSPGYSYRTTALRPGNPPSHGSSESSLSSTSYSSPAHPVSTDSLAPFTGTPGYFSSQPHSGNSTGSNLPRRSCPSSAASPTLQGPSDSPTSDSVSQSSTGTLSSTSFPQNSRSSLPSDLRTISLPSAGQSAVYQASRVSAVSNSQHYPHRGSGGVHQYRLQPLQGSGVKTQTGLS

SEQ ID NO: 101283 - protein, 314 aa, Homo sapiens
MEKLTRRDFQCSSFRDDWECNRQFKKELGSQGGHFNQLVFTHEDLPTLSHHPSFTLQQIINSKKKFCASKEYRKTFRHGSQFATHEIIHTIEKPYECKECGKSFRHPSRLTHHQKIHTGKKPFECKECGKTFICGSDLTRHHRIHTGEKPYECKECGKAFSSGSNFTRHQRIHTGEKPYECKECGKAFSSGSNFTQHQRIHTGEKPYECKECGNAFSQSSQLIKHQRIHTGEKPYECKECEKAFRSGSDLTRHQRIHTGEKPYECKICGKAYSQSSQLISHHRIHTSEKPYEYRECGKNFNYDPQLIQHQNLYW

SEQ ID NO: 101284 - protein, 242 aa, Homo sapiens
MTDSATANGDDRDPEIELFVKAGIDGESIGNCPFSQRLFMILWLKGVVFNVTTVDLKRKPADLHNLAPGTHPPFLTFNGDVKTDVNKIEEFLEETLTPEKYPKLAAKHRESNTAGIDIFSKFSAYIKNTKQQNNAALERGLTKALKKLDDYLNTPLPEEIDANTCGEDKGSRRKFLDGDELTLADCNLLPKLHVVKTHLLTSSSNFLSFLFVEKKGAWSRGRSKQKKWGEARERRKKWDSFY

SEQ ID NO: 101285 - protein, 76 aa, Homo sapiens
MGPLRESKKEHRVQHHDKEISRSRIPRLILRPHMPQQQHKVSPASESPFSEEESREFNPSSSGRSARTVSSNSFCS

SEQ ID NO: 101286 - protein, 234 aa, Homo sapiens
MYQVPLPLDRDGTLVRLRFTMVALVTVCCPLVAFLFCILWSLLFHFKETTATHCGVPNYLPSVSSAIGGEVPQRYVWRFCIGLHSAPRFLVAFAYWNHYLSCTSPCSCYRPLCRLNFGLNVVENLALLVLTYVSSSEDFTIHENAFIVFIASSLGHMLLTCILWRLTKKHTVSQEVRSIPSGGSKAAQKKIKDICPQDSGNGSQVLQLETAALHHQLHLLLLGAGCLLSAQHVL

SEQ ID NO: 101287 - protein, 185 aa, Homo sapiens
EQSLPPPAGLNSSWVELPMNSSNGNDNGNGKNGGLEHVPSSSSIHNGDMEKILLDAQHESGQSSSRGSSHCDSPSPQEDGQIMFDVEMHTSRDHSSQSEEEVVEGEKEVEALKKSADWVSDWSSRPENIPPKEFHFRHPKRSVSLSMRKSGAMKKGGIFSAEFLKVFIPSLFLSHVLALGLGCGN

SEQ ID NO: 101288 - protein, 355 aa, Homo sapiens
  MOD_RES (1)..(1): Any amino acid
XYYALSAMLIAGCIYKYIEYRGAEKEWGDGIRGLSLNAARYALLRVEHGPPHTKNWRPQVLVMLNLDAEQAVKHPRLLSFTSQLKAGKGLTIVGSVLEGTYLDKHMEAQRAEENIRSLMSTEKTKGFCQLVVSSSLRDGMSHLIQSAGLGGLKHNTVLMAWPASWKQEDNPFSWKNFVDTVRDTTAAHQALLVAKNVDSFPQNQERFGGGHIDVWWIVHDGGMLMLLPFLLRQHKVWRKCRMRIFTVAQVDDNSIQMKKDLQMFLYHLRISAEVEVVEMVENDISAFTYERTLMMEQRSQMLKQMQLSKNEQEREAQLIHDRNTASHTAAAARTQAPPTPDKVQMTWTREKLIAE

SEQ ID NO: 101289 - protein, 734 aa, Homo sapiens
MRLLLALLGVLLSVPGPPVLSLEASEEVELEPCLAPSLEQQEQELTVALGQPVRLCCGRAERGGHWYKEGSRLAPAGRVRGWRGRLEIASFLPEDAGRYLCLARGSMIVLQNLTLITGDSLTSSNDDEDPKSHRDPSNRHSYPQQAPYWTHPQRMEKKLHAVPAGNTVKFRCPAAGNPTPTIRWLKDGQAFHGENRIGGIRLRHQHWSLVMESVVPSDRGTYTCLVENAVGSIRYNYLLDVLERSPHRPILQAGLPANTTAVVGSDVELLCKVYSDAQPHIQWLKHIVINGSSFGADGFPYVQVLKTADINSSEVEVLYLRNVSAEDAGEYTCLAGNSIGLSYQSAWLTVLPEEDPTWTAAAPEASSPWSQALPASQAHPWYEACVSPPAAPPCSPASLVLGKPLGEGCFGQVVRAEAFGMDPARPDQASTVAVKMLKDNASDKDLADLVSEMEVMKLIGRHKNIINLLGVCTQEGPLYVIVECAAKGNLREFLRARRPPGPDLSPDGPRSSEGPLSFPVLVSCAYQVARGMQYLESRKCIHRDLAARNVLVTEDNVMKIADFGLARGVHHIDYYKKTSNGRLPVKWMAPEALFDRVYTHQSDVWSFGILLWEIFTLGGSPYPGIPVEELFSLLREGHRMDRPPHCPPELYGLMRECWHAAPSQRPTFKQLVEALDKVLLAVSEEYLDLRLTFGPYSPSGGDASSTCSSSDSVFSHDPLPLGSSSFPFGSGVQT

SEQ ID NO: 101290 - protein, 243 aa, Homo sapiens
MFSLSSTVQPQVTVPLSHLINAFHTPKNTSVSLSGVSVSQNQHRDVVPEHEAPSSEGFLLRDRGSDVESLDKLMKTKNIPEAHQDAFKTGFAEGFLKAQALTQKTNDSLRRTRLILFVLLLFGIYGLLKNPFLSVRFRTTTGLDSAVDPVQMKNVTFEHVKGVEEAKQELQEVVEFLKNPQKFTILGGKLPKGILLVGPPGTGKTLLARAVAGEADVPFYYASGSEFDEMFVGVGASRIRNLF

SEQ ID NO: 101291 - protein, 1020 aa, Homo sapiens
EAQKINNGSSQADGTLKPVDEKEEAVAAEVGWMTSVKDWAGVMISAQTLTGRVLVVLVFALSIGALVIYFIDSSNPIESCQNFYKDFTLQIDMAFNVFFLLYFGLRFIAANDKLWFWLEVNSVVDFFTVPPVFVSVYLNRSWLGLRFLRALRLIQFSEILQFLNILKTSNSIKLVNLLSIFISTWLTAAGFIHLVENSGDPWENFQNNQALTYWECVYLLMVTMSTVGYGDVYAKTTLGRLFMVFFILGGLAMFASYVPEIIELIGNRKKYGGSYSAVSGRKHIVVCGHITLESVSNFLKDFLHKDRDDVNVEIVFLHKVISIKNYHPKIRIITQMLQYHNKAHLLNIPSWNWKEGDDAICLAELKLGFIAQSCLAQGLSTMLANLFSMRSFIKIEEDTWQKYYLEGVSNEMYTEYLSSAFVGLSFPTVCELCFVKLKLLMIAIEYKSANRESRSRKRILINPGNHLKIQEGTLGFFIASDAKEVKRAFFYCKACHDDITDPKRIKKCGCKRLEDEQPSTLSPKKKQRNGGMRNSPNTSPKLMRHDPLLIPGNDQIDNMDSNVKKYDSTGMFHWCAPKEIEKVILTRSEAAMTVLSGHVVVCIFGDVSSALIGLRNLVMPLRASNFHYHELKHIVFVGSIEYLKREWETLHNFPKVSILPGTPLSRADLRAVNINLCDMCVILSANQNNIDDTSLQDKECILASLNIKSMQFDDSIGVLQANSQGFTPPGMDRSSPDNSPVHGMLRQPSITTGVNIPIITELAKPGKLPLVSVNQEKNSGTHILMITELVNDTNVQFLDQDDDDDPDTELYLTQPFACGTAFAVSVLDSLMSATYFNDNILTLIRTLVTGGATPELEALIAEENALRGGYSTPQTLANRDRCRVAQLALLDGPFADLGDGGCYGDLFCKALKTYNMLCFGIYRLRDAHLSTPSQCTKRYVITNPPYEFELVPTDLIFCLMQFDHNAGQSRASLSHSSHSSQSSSKKSSSVHSIPSTANRQNRPKSRESRDKQKYVQEERL

SEQ ID NO: 101292 - protein, 159 aa, Homo sapiens
  MOD_RES (1)..(1): Any amino acid
XCYTFAEMPWYQRRIAKMLFATPPSSTYEKALGYFHRAEQVDPNFYSKNLLLLGKTYLKLHNKKLAAFWLMKAKDYPAHTEEDKQEPDSPRVTLVRDVSPLRVRPITENKPQESLTFSFPCSPHLIVLVWIPELTAGLRCLFPHVHVYQRFCVASPSAS

SEQ ID NO: 101293 - protein, 336 aa, Homo sapiens
MLSAAHDILSHKRTSGNQSHVDPGPTPIPHNSSSRFDCNSVSTAAVLLADILPTLVIKLLAPLGLHLLPYSPRVLVSGICAAGSFVLVAFSHSVGTSLCGVVFASISSGLGEVTFLSLTAFYPSYFLLLTSPEAQDPGGEEEAESAARQPLIRTEAPESKPGSSSSLSLRERWTVFKGLLWYIVPLVVVYFAEYFINQGLFELLFFWNTSLSHAQQYRWYQMLYQAGVFASRSSLRCCRIRFTWALALLQCLNLVFLLADVWFGFLPSIYLVFLIILYEGLLGGAAYVNTFHNIALETSDEHREFAMAATCISDTLGISLSGLLALPLHDFLCQLS

SEQ ID NO: 101294 - protein, 153 aa, Homo sapiens
VDMDGVLADFEAGLLRGFRRRFPEEPHVPLEQRRGFLAREQYRALRPDLADKVASVYEAPGFFLDLEPIPGALDAVREMNDLPDTQVFICTSPLLKYHHCVGEKEETPSWEHILFTCCHNRHLVLPPTRRRLLSWSDNWREILDSKRGAAQRE

SEQ ID NO: 101295 - protein, 37 aa, Homo sapiens
FPLRETPMAGLHQWKTTVSFVAYCCSTQCLQTFDLLS

SEQ ID NO: 101296 - protein, 55 aa, Homo sapiens
MMEGCTRSTAPASSEDLRLLPLLAEDEMKPVCAEVTWIEKTYKEGLWNTEERKGH

SEQ ID NO: 101297 - protein, 616 aa, Homo sapiens
MLDTFRLLVSVGHWLPKPNVISLLEQEAELWAVESRLPQGVYPDLETRPKVKLSVLKQGISEEISNSVILVERFLWDGLWYCRGEDTEGHWEWSCESLESLAVPVAFTPVKTPVLEQWQRNGFGENISLNPDLPHQPMTPERQSPHTWGTRGKREKPDLNVLQKTCVKEKPYKCQECGKAFSHSSALIEHHRTHTGERPYECHECLKGFRNSSALTKHQRIHTGEKPYKCTQCGRTFNQIAPLIQHQRTHTGEKPYECSECGKSFSFRSSFSQHERTHTGEKPYECSECGKAFRQSIHLTQHLRIHTGEKPYQCGECGKAFSHSSSLTKHQRIHTGEKPYECHECGKAFTQITPLIQHQRTHTGEKPYECGECGKAFSQSTLLTEHRRIHTGEKPYGCNECGKTFSHSSSLSQHERTHTGEKPYECSQCGKAFRQSTHLTQHQRIHTGEKPYECNDCGKAFSHSSSLTKHQRIHTGEKPYECNQCGRAFSQLAPLIQHQRIHTGEKPYECNQCGRAFSQSSLLIEHQRIHTKEKPYGCNECGKSFSHSSSLSQHERTHTGEKPYECHDCGKSFRQSTHLTQHRRIHTGEKPYACRDCGKAFTHSSSLTKHQRTHTG

SEQ ID NO: 101298 - protein, 25 aa, Homo sapiens
MINACRDFLELAEIHSRKWQRALQY

SEQ ID NO: 101299 - protein, 120 aa, Homo sapiens
  MOD_RES (1)..(1): Any amino acid
XSCSEVLHPHLTRFLQDVSRTPGLPFQGIAKACEQNLQKTLRFGGRLELPSSIELRAMLAGRSSKRQLFLLPGGLERHLKIKTCTVALDVVEEICAEMALTRPEAFNEYVIFVVTNRGPA

SEQ ID NO: 101300 - protein, 40 aa, Homo sapiens
MMSEHDLADVVQIAVEDLSPDHPGTELWDSSCFGESCSDR
